(19) United States
(12) Patent Application Publication
(10) Pub. No.: US 2023/0242989 A1
(43) Pub. Date: Aug. 3, 2023

(54) TAGMENTATION TO OPEN UP CIRCLES OF DNA AND DETECT EXTRACHROMOSOMAL CIRCLES OF DNA FOR DIAGNOSIS

(71) Applicant: University of Virginia Patent Foundation, Charlottesville, VA (US)

(72) Inventors: Anindya Dutta, Charlottesville, VA (US); Pankaj Kumar, Crozet, VA (US)

(21) Appl. No.: 17/603,150

(22) PCT Filed: Apr. 13, 2020
(86) PCT No.: PCT/US2020/027938

§ 371 Date: Oct. 12, 2021

Related U.S. Application Data
(60) Provisional application No. 62/832,443, filed on Apr. 11, 2019.

(51) Int. Cl. C12Q 1/6886; C12N 15/10

(52) U.S. Cl. CPC C12Q 1/6886; C12N 15/1065; C12Q 1/6806

(57) ABSTRACT

Provided are methods and kits for detecting an extrachromosomal circular DNA (eccDNA) in a biological sample. In some embodiments, the method comprises treating the biological sample to produce a tagged linearized fragment of genomic DNA; and determining whether the tagged linearized fragment is derived from an eccDNA to thereby detect the eccDNA. In some embodiments, the treating of the biological sample to produce a tagged linearized fragment of genomic DNA comprises treating the biological sample with an insertional enzyme complex to produce a tagged linearized fragment of genomic DNA.

### CROSS REFERENCE TO RELATED APPLICATION

[0001] The presently disclosed subject matter claims the benefit of U.S. Provisional Pat. Application Serial Nos. 62/832,443, filed Apr. 11, 2019; the disclosure of which is incorporated herein by reference in its entirety.

### GOVERNMENT INTEREST

[0002] This invention was made with government support under Grant No. CA060499 awarded by The National Institutes of Health. The government has certain rights in the invention.

### BACKGROUND

[0003] The presence of tens of thousands of extrachomosomal DNA (eccDNA) in the nuclei of human and mouse cell lines as well as normal tissues and cancers has been previously reported (Dillon et al., Cell Rep 11, 1749-1759 (2015); Kumar et al., Mol Cancer Res 15, 1197-1205 (2017); Shibata et al., Science 336, 82-86 (2012)). Several other groups have also described the presence of eccDNAs in various eukaryotes ranging from yeasts to humans (Moller et al., G3 (Bethesda) 6, 453-462 (2015); Moller et al., Proc Natl Acad Sci USA 112, E3114-3122 (2015); Moller et al., Nat Commun 9, 1069 (2018); deCarvalho et al., Nat Genet 50, 708-717 (2018); Shoura et al., G3 (Bethesda) 7, 3295-3303 (2017); Turner et al., Nature 543, 122-125 (2017)). More recently it has been shown that circular DNA promotes the expression of oncogenes (Wu et al., Nature 575, 699-703 (2019)). Not only the oncogenes but also the regulatory regions associated with genes are also amplified as eccDNA (Morton et al., Cell 179, 1330-1341 e1313 (2019)). Thus, approaches are needed in the art to assess and characterize eccDNAs from samples.

### SUMMARY

[0004] This Summary lists several embodiments of the presently disclosed subject matter, and in many cases lists variations and permutations of these embodiments of the presently disclosed subject matter. This Summary is merely exemplary of the numerous and varied embodiments. Mention of one or more representative features of a given embodiment is likewise exemplary. Such an embodiment can typically exist with or without the feature(s) mentioned; likewise, those features can be applied to other embodiments of the presently disclosed subject matter, whether listed in this Summary or not. To avoid excessive repetition, this Summary does not list or suggest all possible combinations of such features.

[0005] A method of detecting an extrachromosomal circular DNA (eccDNA) in a biological sample is provided in accordance with the presently disclosed subject matter. In some embodiments, the method comprises treating the biological sample to produce a tagged linearized fragment of genomic DNA; and determining whether the tagged linearized fragment is derived from an eccDNA to thereby detect the eccDNA. In some embodiments, the treating of the biological sample to produce a tagged linearized fragment of genomic DNA comprises treating the biological sample with an insertional enzyme complex to produce a tagged linearized fragment of genomic DNA.

[0006] In some embodiments, determining whether the tagged linearized fragment is derived from an eccDNA comprises amplifying the tagged linearized fragment of genomic DNA. In some embodiments, determining whether the tagged linearized fragment is derived from an eccDNA comprises sequencing the tagged linearized fragment of genomic DNA. In some embodiments, determining whether the tagged linearized fragment is derived from an eccDNA comprises detecting a junctional sequence in the tagged linearized fragment. In some embodiments, detecting a junctional sequence comprises employing read pairs.

[0007] In some embodiments, the method further comprising treating the sample with an exonuclease prior to treating the biological sample to produce a tagged linearized fragment of genomic DNA, optionally treating the sample with an exonuclease prior to treating the biological sample with an insertional enzyme complex to produce a tagged linearized fragment enriched from eccDNA. In some embodiments, the insertional enzyme complex comprises an insertional enzyme and at least two adaptors molecules. In some embodiments, the insertional enzyme is a transposase. In some embodiments, the transposase is a Tn5 transposase.

[0008] In some embodiments, the sample comprises a biopsy or a blood sample. In some embodiments, the subject is a subject suffering from a cancer or suspected to be suffering from a cancer or a subject having a genetic disease or disorder or suspected to have a genetic disease or disorder. In some embodiments, the subject having a genetic disease or disorder or suspected to have a genetic disease or disorder is a fetus and the sample comprises a maternal blood sample.

[0009] In some embodiments, the presently disclosed subject matter provides for analyzing a sample from a subject to detect eccDNA; and providing a diagnosis or prognosis based on the detected eccDNA. In some embodiments, providing a diagnosis or prognosis comprises identifying a cell type in the subject, identifying a cell population, identifying a tissue type, and/or identifying a nucleic acid sequence on the eccDNA. In some embodiments, the method further comprises choosing a therapy based on the diagnosis or prognosis, optionally based on the identified cell type, cell population, tissue type, or nucleic acid.

[0010] In some embodiments, the presently disclosed subject matter provides a method of detecting a cell type, a population of cells, or a tissue type in a subject. In some embodiments, the method comprises (a) detecting an extrachromosomal circular DNA (eccDNA) in a biological sample from the subject by: (i) treating the biological sample to produce a tagged linearized fragment of genomic DNA; and (ii) determining whether the tagged linearized fragment is derived from an eccDNA to thereby detect the eccDNA; and (b) determining a genomic region from which the eccDNA is derived to thereby detect a cell type, a population of cells, or a tissue type in a subject.

[0011] In some embodiments, treating the biological sample to produce a tagged linearized fragment, optionally enriched from genomic eccDNA, comprises treating the biological sample with an insertional enzyme complex to produce a tagged linearized fragment of genomic DNA, optionally treating the biological sample with an exonuclease to digest genomic linear DNA and then with an insertional enzyme complex to produce a tagged linearized fragment of genomic DNA. In some embodiments, determining whether the tagged linearized fragment is derived from an eccDNA comprises amplifying the tagged linearized fragment of genomic DNA. In some embodiments, determining whether the tagged linearized fragment is derived from an eccDNA comprises sequencing the tagged linearized fragment of genomic DNA. In some embodiments, determining whether the tagged linearized fragment is derived from an eccDNA comprises detecting a junctional sequence in the tagged linearized fragment. In some embodiments, detecting a junctional sequence comprises employing read pairs.

[0012] In some embodiments, the method further comprises treating the sample with an exonuclease prior to treating the biological sample to produce a tagged linearized fragment of genomic DNA. In some embodiments, the insertional enzyme complex comprises an insertional enzyme and at least two adaptors molecules. In some embodiments, the insertional enzyme is a transposase. In some embodiments, the transposase is a Tn5 transposase.

[0013] In some embodiments, the sample comprises a biopsy or a blood sample. In some embodiments, the subject is a subject suffering from a cancer or suspected to be suffering from a cancer or a subject having a genetic disease or disorder or suspected to have a genetic disease or disorder. In some embodiments, the subject having a genetic disease or disorder or suspected to have a genetic disease or disorder is a fetus and the sample comprises a maternal blood sample.

[0014] In some embodiments, identifying a cell type in the subject, identifying a cell population, identifying a tissue type; and/or identifying a nucleic acid sequence on the eccDNA further comprises identifying a cancer or a genetic disease or disorder in the subject. In some embodiments, the method further comprises choosing a therapy based on the identified cell type, cell population, tissue type, and/or nucleic acid sequence.

[0015] In some embodiments, the presently disclosed subject matter provides a method of detecting a nucleic acid sequence associated with a condition in a subject. In some embodiments, the method comprises (a) detecting an extrachromosomal circular DNA (eccDNA) in a sample from the subject by: (i) treating the biological sample to produce a tagged linearized fragment of genomic DNA; and (ii) determining whether the tagged linearized fragment is derived from an eccDNA to thereby detect the eccDNA; and (b) detecting a presence of a nucleic acid sequence on the eccDNA, wherein the nucleic acid sequence is associated with a condition in the subject.

[0016] In some embodiments, treating the biological sample to produce a tagged linearized fragment, optionally enriched from genomic eccDNA, comprises treating the biological sample with an insertional enzyme complex to produce a tagged linearized fragment of genomic DNA, optionally treating the biological sample with an exonuclease to digest genomic linear DNA and then with an insertional enzyme complex to produce a tagged linearized fragment of genomic DNA. In some embodiments, determining whether the tagged linearized fragment is derived from an eccDNA comprises amplifying the tagged linearized fragment of genomic DNA. In some embodiments, determining whether the tagged linearized fragment is derived from an eccDNA comprises sequencing the tagged linearized fragment of genomic DNA. In some embodiments, determining whether the tagged linearized fragment is derived from an eccDNA comprises detecting a junctional sequence in the tagged linearized fragment. In some embodiments, detecting a junctional sequence comprises employing read pairs.

[0017] In some embodiments, the method further comprises treating the sample with an exonuclease prior to treating the biological sample to produce a tagged linearized fragment of genomic DNA. In some embodiments, the insertional enzyme complex comprises an insertional enzyme and at least two adaptors molecules. In some embodiments, the insertional enzyme is a transposase. In some embodiments, the transposase is a Tn5 transposase.

[0018] In some embodiments, the sample comprises a biopsy or a blood sample. In some embodiments, the subject is a subject suffering from a cancer or suspected to be suffering from a cancer or a subject having a genetic disease or disorder or suspected to have a genetic disease or disorder. In some embodiments, the subject having a genetic disease or disorder or suspected to have a genetic disease or disorder is a fetus and the sample comprises a maternal blood sample.

[0019] In some embodiments, identifying a cell type in the subject, identifying a cell population, identifying a tissue type; and/or identifying a nucleic acid sequence on the eccDNA further comprises identifying a cancer or a genetic disease or disorder in the subject. In some embodiments, the method further comprises choosing a therapy based on the identified cell type, cell population, tissue type, and/or nucleic acid sequence.

[0020] In some embodiments, a kit for detecting eccDNA in a sample is disclosed. In some embodiments, the kit comprises one or more reagents suitable for carrying out a method in accordance with the presently disclosed subject matter, and instructional material for employing the one or more reagents.

[0021] Accordingly, it is an object of the presently disclosed subject matter to provide methods for detecting eccDNA in a sample. This and other objects are achieved in whole or in part by the presently disclosed subject matter. Further, objects of the presently disclosed subject matter having been stated above, other objects and advantages of the presently disclosed subject matter will become apparent to those skilled in the art after a study of the following description, Figures, and EXAMPLES. Additionally, various aspects and embodiments of the presently disclosed subject matter are described in further detail below.

### BRIEF DESCRIPTION OF THE FIGURES

[0022] The presently disclosed subject matter can be better understood by referring to the following figures. The components in the figures are not necessarily to scale, emphasis instead being placed upon illustrating the principles of the presently disclosed subject matter (often schematically). In the figures, like reference numerals designate corresponding parts throughout the different views. A further understanding of the presently disclosed subject matter can be obtained by reference to an embodiment set forth in the illustrations of the accompanying drawings. Although the illustrated embodiment is merely exemplary of systems for carrying out the presently disclosed subject matter, both the organization and method of operation of the presently disclosed subject matter, in general, together with further objectives and advantages thereof, may be more easily understood by reference to the drawings and the following description. The drawings are not intended to limit the scope of this presently disclosed subject matter, which is set forth with particularity in the claims as appended or as subsequently amended, but merely to clarify and exemplify the presently disclosed subject matter.

[0023] For a more complete understanding of the presently disclosed subject matter, reference is now made to the following drawings in which:

[0024] FIGS. 1A to 1C show that a circle could be part of an ATAC-seq library. FIG. 1A is a schematic showing that if circular DNA has open chromatin structure near or around the ligation point the library preparation method will cut and attach an adaptor into a DNA fragment from eccDNA. FIG. 1B is a schematic one end of paired end read mapping on the body of a circular DNA with read from the other end mapping on the ligation junction. FIG. 1C is a flow chart showing detailed steps from mapping to identification of the new Circle_finder pipeline.

[0025] FIG. 2 is a plot showing length distribution of identified eccDNA in C4-2 and OVCAR8 cell lines.

[0026] FIGS. 3A to 3D show experimental validation of randomly selected eccDNA identified by ATAC-seq in C4-2B and OVCAR8 cells. FIG. 3A is a schematic for isolation and detection of extra-chromosomal circular DNA. See Materials and Methods for EXAMPLES 1-8 for details. FIG. 3B is a digital image of an electrophoresis gel showing PCR detection of eccDNA. DNA bands marked with boxes were gel purified and sequenced. FIG. 3C is a table describing eccDNAs validated in FIG. 3B, based on analysis of ATAC-seq data from OVCAR8 and C4-2B. FIG. 3D is a schematic showing junctional tags obtained after sequencing of PCR products in FIG. 3B. Shaded and unshaded sequences depict 15 bases on either side of junctions (SEQ ID NOs: 1-11 from top to bottom, respectively; see also Table 2 herein below). Numbers indicate chromosomal location on respective chromosomes C1-C11, sequences provided in the Sequence Listing as follows: C1, SEQ ID NO: 12; C2, SEQ ID NO: 13; C3, SEQ ID NO: 14; C4, SEQ ID NO: 15; C5, SEQ ID NO: 16; C6, SEQ ID NO: 17; C7, SEQ ID NO: 18; C8, SEQ ID NO: 19; C9, SEQ ID NO: 20; C10, SEQ ID NO: 21; C11, SEQ ID NO: 22. Note the match between numbers for each circle in FIG. 3C and FIG. 3D. Some of the junction sequence identified by Sanger sequencing differ by few bases due to multiple species of eccDNA present in given cell lines. Oval circles represent insertion and boxed sequences represent mismatches. *-Sequence obtained from the bottom strand.

[0027] FIGS. 4A to 4E show eccDNA in cell lines and LGG or GBM tumors. FIG. 4A is a set of digital images showing detection of EccDNA in OVCAR8 cell line by FISH: Metaphase spread of chromosome (larger lighter areas; blue when seen in color) from OVCAR8 cells were stained with the probe (smaller lighter areas; green when seen in color) against the eccDNA locus chr2: 238136071-238170279 (Top Row) or chr10: 103457331-103528085 (Bottom Row). The spreads on the left do not have an extrachromosomal signal, while the spreads on the right have extrachromosomal signals that are better seen in the magnified insets on the extreme right. White arrowheads mark the eccDNA signals. FIG. 4B is a digital imaging showing that for the negative control cell lines, C4-2, the spread does not have extrachromosomal DNA of the type being probed for. FIG. 4C is a plot showing that the eccDNA signals in OVCAR8 (n = 28) and C4-2 (n = 24) (negative control) were quantified for locus chr10: 103457331-103528085 and shown in the graph. P values were calculated using student’s t-test, **p<0.01. FIG. 4D is a plot showing that eccDNA/duplication loci identified in WGS libraries show genomic amplification (median 1.5 fold), suggesting at least one allele is duplicated in all the cells, but this would be difficult to call reliably because of statistical variations and would need the expense of whole genome sequencing. eccDNA loci identified in ATAC-seq libraries do not show genomic amplification (median close to zero). Thus, the eccDNA are apparent by the presently disclosed method before a copy number variation (CNV) can be reliably detected at the locus by genome sequencing methods. Value of CNA in Y-axis is in log2. FIG. 4E is a plot showing length distribution of eccDNA identified in LGG and GBM TCGA ATAC-seq data.

[0028] FIGS. 5A to 5E show properties of microDNA identified herein (eccDNA<1 kb) by ATAC-seq. FIG. 5A is a plot showing length distribution of eccDNA shows peaks at 180 and 380 bases. FIG. 5B is a plot showing that the GC content of eccDNA locus and regions immediately upstream and downstream from the eccDNA is higher than genomic average as calculated from 1000 random stretches of the genome of equivalent length as the eccDNA (Random-1000). FIG. 5C is a bar graph showing that the sites in the genome that give rise to small eccDNA are enriched relative to random expectation in genic sites, sequences 2 kb upstream from genes and in CpG islands. FIG. 5D is a bar graph showing that direct repeats of 2-15 bp flanking the genomic locus of the eccDNA at ligation point are present for about 20% of the loci. FIG. 5E is a heat map showing gene classes enriched in the set of genes found on the circular DNAs in two or more cancers. The shading scale (light to dark shading; blue to black when shown in color) indicates enrichment in pathway (lighter shading or blue color indicates pathway was enriched). If the genes found on the eccDNA/duplication loci in a cancer type are significantly enriched in the indicated pathways, the color in the cell is light gray (blue when shown in color). If the set of genes is not enriched in that cancer, the cell is black.

[0029] FIG. 6 is a plot showing length distribution of identified eccDNA in GBM cell lines.

[0030] FIG. 7 is a plot showing copy number analysis limitation with TCGA SNP array hybridization data. In general, genotyping arrays will fail to identify amplifications caused by the circular DNAs detected in the presently disclosed analysis. The minimum detectable segment length (y-axis) is partially dependent on the extent of amplification (x-axis). Assuming that one copy of a circular DNA is present in every cell of a patient’s tumor, the segment mean would be 0.585 and the minimum detectable length would therefore be approximately 1.5 MB. Given that the average length of the circular DNAs detected in this analysis was 2 kb, the circular DNAs detected in this analysis would not show up as amplifications when genotyping array data is analyzed.

[0031] FIG. 8 is a table providing example of circles identified in HCT116 ATAC-Seq data. Split reads and mapped read mapping position is given for each of the mapped-unmapped pairs.

[0032] FIG. 9 is a plot showing length distribution of circles identified in bulk HCT116 cell population by ATAC-Seq method.

[0033] FIG. 10 is a plot showing circles identified in single cell ATAC-seq data. Median number of microDNA per cell in various cell type.

[0034] FIG. 11 is a set of TSNE plots showing that microDNA are generated in a tissue specific manner. The TSNE plots are based on profiles of where in the genome the microDNA arise from. Left: MicroDNA profiles in human fibroblasts & lymphoblasts. Right: Mouse cardiomyocyte & CD4+ cells.

[0035] FIG. 12 is a schematic of tumor cells, showing an approach for detecting eccDNAs pre-amplification to avoid drugs to which the tumor will quickly become resistant by amplifying the drug-resistant gene.

[0036] FIG. 13 is a schematic showing eccDNA map will identify genes poised to amplify at the pre-amplification step. A blow-up of a section of a karyotype plot is shown on the left side of FIG. 13, while a blow-up of a section of a plot of copy number versus chromosome position from Zong, Science, 2012, is shown on the right side to illustrate how CNV is called by current genomic methods.

[0037] FIG. 14 is a plot of abundance versus eccDNAs length (kb) in cancer cells and in normal cells.

### REFERENCE TO SEQUENCE LISTING

[0038] The Sequence Listing associated with the instant disclosure has been submitted electronically herewith as an 801 kilobyte file with File Name (Sequence_Listing_3062-123_PCT_ST25.txt), Creation Date (Apr. 13, 2020), Computer System (IBM-PC/MS-DOS/MS-Windows), and Docket No. (3062/123 PCT). The Sequence Listing submitted electronically herewith is hereby incorporated by reference into the instant disclosure.

### DETAILED DESCRIPTION

[0039] The presently disclosed subject matter now will be described more fully hereinafter, in which some, but not all embodiments of the presently disclosed subject matter are described. Indeed, the presently disclosed subject matter can be embodied in many different forms and should not be construed as limited to the embodiments set forth herein; rather, these embodiments are provided so that this disclosure will satisfy applicable legal requirements.

[0040] ATAC-seq (Assay for Transposase-Accessible Chromatin using sequencing) identifies open chromatin regions all across the genome (Buenrostro et al., Curr Protoc Mol Biol 109, 21 29 21-29 (2015)). The method uses the hyperactive transposase Tn5 to cut the accessible chromatin with simultaneous ligation of adapters at cut sites (Buenrostro et al., Curr Protoc Mol Biol 109, 21 29 21-29 (2015)). Since isolated nuclei as a whole are subjected to the transposition reaction in ATAC-seq, the presently disclosed subject matter relates to the investigation of whether the transposase will also cleave DNA from eccDNAs, and so the ATAC-seq libraries will contain fragments of DNA from eccDNA. Thus, the presently disclosed subject matter relates in some embodiments to the use of transposase (tagmentation) to linearize circles of extrachromosomal DNA and high throughput sequencing to identify such circles in cells, cancers, and body fluids. Particularly, it is demonstrated herein that opening the circle by transposase (tagmentation) detects circles of DNA very efficiently. ATAC-seq data was analyzed from cell populations and from single cells where the transposase was used to fragment cellular DNA, which was subsequently sequenced. The presently disclosed subject matter thus provides in some embodiments that transposase tagging of DNA followed by high throughput sequencing efficiently identifies circles of DNA.

[0041] Continuing, extrachromosomal circular DNAs (eccDNAs) are usually somatically mosaic and a source of intercellular heterogeneity in normal and tumor cells. Because short eccDNAs are poorly chromatinized, in accordance with aspects of the presently disclosed subject matter they were sequenced by tagmentation in ATAC-seq experiments, without any enrichment of circular DNA. Thousands of eccDNAs were identified. The eccDNAs identified in cell lines were validated by inverse PCR on DNA that survives exonuclease digestion of linear DNA, and by metaphase FISH. ATAC-seq in gliomas and glioblastomas identify hundreds of eccDNAs, including one containing the well-known EGFR gene amplicon from chr7. Over 18,000 eccDNAs, many carrying known cancer driver genes, are identified in a pan-cancer analysis of 360 ATAC-seq libraries from 23 tumor types. Because of somatic mosaicism, eccDNAs are identified by ATAC-seq even before amplification of the locus is recognized by genome-wide copy number variation measurements. Thus, standard ATAC-seq is a sensitive method to detect eccDNA present in a subset of tumor cells, ready to be amplified under appropriate selection, as during therapy.

[0042] According to exemplary embodiments of the presently disclosed subject matter, ATAC-seq libraries were first preparing using C4-2B (prostate cancer) and OVCAR8 (ovarian cancer) cell lines. Hundreds of eccDNAs were identified using the presently disclosed computational pipeline. Inverse PCR on exonuclease resistant extrachromosmal DNA (highly enriched in circular DNA) and FISH on metaphase spreads confirmed the presence of the identified somatically mosaic eccDNA. To provide additional evidence of the success of ATAC-seq in identifying eccDNA, an ATAC-seq library generated from patient-derived GBM cell lines (Xie et al., Cell 175, 1228-1243 e1220 (2018)) was analyzed and the eccDNA harboring EGFR gene was identified, which is known to be amplified through the formation of eccDNA in GBM. Finally, ATAC-seq data from GBM and LGG generated by the TCGA consortium was analyzed to identify hundreds of eccDNAs even before their amplification was apparent as a copy number variation by hybridization to SNP arrays. Genes involved in pathways related to nucleosomal events were significantly enriched in these loci.

[0043] Headings are included herein for reference and to aid in locating certain sections. These headings are not intended to limit the scope of the concepts described therein under, and these concepts may have applicability in other sections throughout the entire specification.

### I. Definitions

[0044] The terminology used herein is for the purpose of describing particular embodiments only and is not intended to be limiting of the presently disclosed subject matter.

[0045] While the following terms are believed to be well understood by one of ordinary skill in the art, the following definitions are set forth to facilitate explanation of the presently disclosed subject matter.

[0046] All technical and scientific terms used herein, unless otherwise defined below, are intended to have the same meaning as commonly understood by one of ordinary skill in the art. References to techniques employed herein are intended to refer to the techniques as commonly understood in the art, including variations on those techniques or substitutions of equivalent techniques that would be apparent to one of skill in the art. While the following terms are believed to be well understood by one of ordinary skill in the art, the following definitions are set forth to facilitate explanation of the presently disclosed subject matter.

[0047] The articles “a” and “an” are used herein to refer to one or to more than one (i.e., to at least one) of the grammatical object of the article. By way of example, “an element” means one element or more than one element.

[0048] The term “about”, as used herein, means approximately, in the region of, roughly, or around. When the term “about” is used in conjunction with a numerical range, it modifies that range by extending the boundaries above and below the numerical values set forth. For example, in some embodiments, the term “about” is used herein to modify a numerical value above and below the stated value by a variance of 10%. Therefore, about 50% means in the range of 45%-55%. Numerical ranges recited herein by endpoints include all numbers and fractions subsumed within that range (e.g., 1 to 5 includes 1, 1.5, 2, 2.75, 3, 3.90, 4, and 5). It is also to be understood that all numbers and fractions thereof are presumed to be modified by the term “about”.

[0049] As used herein, amino acids are represented by the full name thereof, by the three letter code corresponding thereto, or by the one-letter code corresponding thereto, as indicated in Table 1:

TABLE 1

Amino Acid Codes and Functionally Equivalent Codons

| | | | |
|---|---|---|---|
| Full Name | 3-Letter Code | 1-Letter Code | Functionally Equivalent Codons |
| Aspartic Acid | Asp | D | GAC; GAU |
| Glutamic Acid | Glu | E | GAA; GAG |
| Lysine | Lys | K | AAA; AAG |
| Arginine | Arg | R | AGA; AGG; CGA; CGC; CGG; CGU |
| Histidine | His | H | CAC; CAU |
| Tyrosine | Tyr | Y | UAC; UAU |
| Cysteine | Cys | C | UGC; UGU |
| Asparagine | Asn | N | AAC; AAU |
| Glutamine | Gln | Q | CAA; CAG |
| Serine | Ser | S | ACG; AGU; UCA; UCC; UCG; UCU |
| Threonine | Thr | T | ACA; ACC; ACG; ACU |
| Glycine | Gly | G | GGA; GGC; GGG; GGU |
| Alanine | Ala | A | GCA; GCC; GCG; GCU |
| Valine | Val | V | GUA; GUC; GUG; GUU |
| Leucine | Leu | L | UUA; UUG; CUA; CUC; CUG; CUU |
| Isoleucine | Ile | I | AUA; AUC; AUU |
| Methionine | Met | M | AUG |
| Proline | Pro | P | CCA; CCC; CCG; CCU |
| Phenylalanine | Phe | F | UUC; UUU |
| Tryptophan | Trp | W | UGG |

[0050] The expression “amino acid” as used herein is meant to include both natural and synthetic amino acids, and both D and L amino acids. “Standard amino acid” means any of the twenty standard L-amino acids commonly found in naturally occurring peptides. “Nonstandard amino acid residue” means any amino acid, other than the standard amino acids, regardless of whether it is prepared synthetically or derived from a natural source. As used herein, “synthetic amino acid” also encompasses chemically modified amino acids, including but not limited to salts, amino acid derivatives (such as amides), and substitutions. Amino acids contained within the peptides of the presently disclosed subject matter, and particularly at the carboxy- or amino-terminus, can be modified by methylation, amidation, acetylation or substitution with other chemical groups which can change the peptide’s circulating half-life without adversely affecting their activity. Additionally, a disulfide linkage may be present or absent in the peptides of the presently disclosed subject matter.

[0051] The term “amino acid” is used interchangeably with “amino acid residue,” and can refer to a free amino acid or to an amino acid residue of a peptide. It will be apparent from the context in which the term is used whether it refers to a free amino acid or a residue of a peptide.

[0052] Amino acids can be classified into seven groups on the basis of the side chain R: (1) aliphatic side chains, (2) side chains containing a hydroxylic (OH) group, (3) side chains containing sulfur atoms, (4) side chains containing an acidic or amide group, (5) side chains containing a basic group, (6) side chains containing an aromatic ring, and (7) proline, an imino acid in which the side chain is fused to the amino group.

[0053] Amino acids have the following general structure:

[chemical structure]

[0054] The nomenclature used to describe the peptide compounds of the presently disclosed subject matter follows the conventional practice wherein the amino group is presented to the left and the carboxy group to the right of each amino acid residue. In the formulae representing selected specific embodiments of the presently disclosed subject matter, the amino-and carboxy-terminal groups, although not specifically shown, will be understood to be in the form they would assume at physiologic pH values, unless otherwise specified.

[0055] The term “basic” or “positively charged” amino acid, as used herein, refers to amino acids in which the R groups have a net positive charge at pH 7.0, and include, but are not limited to, the standard amino acids lysine, arginine, and histidine.

[0056] A “control” cell, tissue, sample, or subject is a cell, tissue, sample, or subject of the same type as a test cell, tissue, sample, or subject. The control may, for example, be examined at precisely or nearly the same time the test cell, tissue, sample, or subject is examined. The control may also, for example, be examined at a time distant from the time at which the test cell, tissue, sample, or subject is examined, and the results of the examination of the control may be recorded so that the recorded results may be compared with results obtained by examination of a test cell, tissue, sample, or subject. The control may also be obtained from another source or similar source other than the test group or a test subject, where the test sample is obtained from a subject suspected of having a disease or disorder for which the test is being performed.

[0057] A “test” cell, tissue, sample, or subject is one being examined or treated.

[0058] A “compound”, as used herein, refers to any type of substance or agent that is commonly considered a drug, or a candidate for use as a drug, combinations, and mixtures of the above, as well as other non-limiting examples like polypeptides and antibodies.

[0059] As used herein, a “detectable marker” or a “reporter molecule” is an atom or a molecule that permits the specific detection of a compound comprising the marker in the presence of similar compounds without a marker. Detectable markers or reporter molecules include, e.g., radioactive isotopes, antigenic determinants, enzymes, nucleic acids available for hybridization, chromophores, fluorophores, chemiluminescent molecules, electrochemically detectable molecules, and molecules that provide for altered fluorescence-polarization or altered light-scattering.

[0060] A “disease” is a state of health of an animal wherein the animal cannot maintain homeostasis, and wherein if the disease is not ameliorated then the animal’s health continues to deteriorate.

[0061] In contrast, a “disorder” in an animal is a state of health in which the animal is able to maintain homeostasis, but in which the animal’s state of health is less favorable than it would be in the absence of the disorder. Left untreated, a disorder does not necessarily cause a further decrease in the animal’s state of health.

[0062] As used herein, a “functional” molecule is a molecule in a form in which it exhibits a property or activity by which it is characterized.

[0063] As used herein, a “functional biological molecule” is a biological molecule in a form in which it exhibits a property by which it is characterized. A functional enzyme, for example, is one which exhibits the characteristic catalytic activity by which the enzyme is characterized.

[0064] “Homologous” as used herein, refers to the subunit sequence similarity between two polymeric molecules, e.g., between two nucleic acid molecules, e.g., two DNA molecules or two RNA molecules, or between two polypeptide molecules. When a subunit position in both of the two molecules is occupied by the same monomeric subunit, e.g., if a position in each of two DNA molecules is occupied by adenine, then they are homologous at that position. The homology between two sequences is a direct function of the number of matching or homologous positions, e.g., if half (e.g., five positions in a polymer ten subunits in length) of the positions in two compound sequences are homologous then the two sequences are 50% homologous, if 90% of the positions, e.g., 9 of 10, are matched or homologous, the two sequences share 90% homology. By way of example, the DNA sequences 5’-ATTGCC-3’ and 5’-TATGGC-3’ share 50% homology.

[0065] As used herein, “homology” is used synonymously with “identity”.

[0066] The determination of percent identity between two nucleotide or amino acid sequences can be accomplished using a mathematical algorithm. For example, a mathematical algorithm useful for comparing two sequences is the algorithm of Karlin & Altschul, 1990, modified as in Karlin & Altschul, 1993). This algorithm is incorporated into the NBLAST and XBLAST programs (see Altschul et al., 1990a; Altschul et al., 1990b), and can be accessed, for example at the National Center for Biotechnology Information (NCBI) world wide web site. BLAST nucleotide searches can be performed with the NBLAST program (designated “blastn” at the NCBI web site), using the following parameters: gap penalty = 5; gap extension penalty = 2; mismatch penalty = 3; match reward = 1; expectation value 10.0; and word size = 11 to obtain nucleotide sequences homologous to a nucleic acid described herein. BLAST protein searches can be performed with the XBLAST program (designated “blastn” at the NCBI web site) or the NCBI “blastp” program, using the following parameters: expectation value 10.0, BLOSUM62 scoring matrix to obtain amino acid sequences homologous to a protein molecule described herein. To obtain gapped alignments for comparison purposes, Gapped BLAST can be utilized as described in Altschul et al., 1997. Alternatively, PSI-Blast or PHI-Blast can be used to perform an iterated search which detects distant relationships between molecules (Id.) and relationships between molecules which share a common pattern. When utilizing BLAST, Gapped BLAST, PSI-Blast, and PHI-Blast programs, the default parameters of the respective programs (e.g., XBLAST and NBLAST) can be used.

[0067] The percent identity between two sequences can be determined using techniques similar to those described above, with or without allowing gaps. In calculating percent identity, typically exact matches are counted.

[0068] As used herein, the term “hybridization” is used in reference to the pairing of complementary nucleic acids. Hybridization and the strength of hybridization (i.e., the strength of the association between the nucleic acids) is impacted by such factors as the degree of complementarity between the nucleic acids, stringency of the conditions involved, the length of the formed hybrid, and the G:C ratio within the nucleic acids.

[0069] The term “ingredient” refers to any compound, whether of chemical or biological origin, that can be used in cell culture media to maintain or promote the proliferation, survival, or differentiation of cells. The terms “component”, “nutrient”, “supplement”, and ingredient” can be used interchangeably and are all meant to refer to such compounds. Typical non-limiting ingredients that are used in cell culture media include amino acids, salts, metals, sugars, lipids, nucleic acids, hormones, vitamins, fatty acids, proteins, and the like. Other ingredients that promote or maintain cultivation of cells ex vivo can be selected by those of skill in the art, in accordance with the particular need.

[0070] Used interchangeably herein are the terms “isolate” and “select”.

[0071] The term “isolated”, when used in reference to cells, refers to a single cell of interest, or population of cells of interest, at least partially isolated from other cell types or other cellular material with which it naturally occurs in the tissue of origin. A sample of stem cells is “substantially pure” when it is in some embodiments at least 60%, in some embodiments at least 75%, in some embodiments at least 90%, and, in certain cases, in some embodiments at least 99% free of cells other than cells of interest. Purity can be measured by any appropriate method, for example, by fluorescence-activated cell sorting (FACS), or other assays, which distinguish cell types.

[0072] An “isolated nucleic acid” refers to a nucleic acid segment or fragment, which has been separated from sequences, which flank it in a naturally occurring state, e.g., a DNA fragment that has been removed from the sequences, which are normally adjacent to the fragment, e.g., the sequences adjacent to the fragment in a genome in which it naturally occurs. The term also applies to nucleic acids, which have been substantially purified, from other components, which naturally accompany the nucleic acid, e.g., RNA or DNA, or proteins, which naturally accompany it in the cell. The term therefore includes, for example, a recombinant DNA which is incorporated into a vector, into an autonomously replicating plasmid or virus, or into the genomic DNA of a prokaryote or eukaryote, or which exists as a separate molecule (e.g., as a cDNA or a genomic or cDNA fragment produced by PCR or restriction enzyme digestion) independent of other sequences. It also includes a recombinant DNA, which is part of a hybrid gene encoding additional polypeptide sequence.

[0073] Unless otherwise specified, a “nucleotide sequence encoding an amino acid sequence” includes all nucleotide sequences that are degenerate versions of each other and that encode the same amino acid sequence. Nucleotide sequences that encode proteins and RNA may include introns.

[0074] As used herein, a “ligand” is a compound that specifically binds to a target compound. A ligand (e.g., an antibody) “specifically binds to” or “is specifically immunoreactive with” a compound when the ligand functions in a binding reaction which is determinative of the presence of the compound in a sample of heterogeneous compounds. Thus, under designated assay (e.g., immunoassay) conditions, the ligand binds preferentially to a particular compound and does not bind to a significant extent to other compounds present in the sample. For example, an antibody specifically binds under immunoassay conditions to an antigen bearing an epitope against which the antibody was raised. A variety of immunoassay formats may be used to select antibodies specifically immunoreactive with a particular antigen. For example, solid-phase ELISA immunoassays are routinely used to select monoclonal antibodies specifically immunoreactive with an antigen. See Harlow & Lane, 1988 for a description of immunoassay formats and conditions that can be used to determine specific immunoreactivity.

[0075] A “receptor” is a compound that specifically or selectively binds to a ligand.

[0076] As used herein, the term “linkage” refers to a connection between two groups. The connection can be either covalent or non-covalent, including but not limited to ionic bonds, hydrogen bonding, and hydrophobic/hydrophilic interactions.

[0077] As used herein, the term “linker” refers to either a molecule that joins two other molecules covalently or noncovalently, e.g., through ionic or hydrogen bonds or van der Waals interactions.

[0078] The terms “gene product” or “expression product” are used herein interchangeably to refer to the RNA transcription products (RNA transcript) of a gene, including mRNA, and the polypeptide translation product of such RNA transcripts. A gene product may be, for example, a polynucleotide gene expression product (e.g., an unspliced RNA, an mRNA, a splice variant mRNA, a microRNA, a fragmented RNA, and the like) or a protein expression product (e.g., a mature polypeptide, a post-translationally modified polypeptide, a splice variant polypeptide, and the like). In some embodiments the gene expression product may be a sequence variant including mutations, fusions, loss of heterozygoxity (LOH), and/or biological pathway effects.

[0079] “Stringency” of hybridization reactions is readily determinable by one of ordinary skill in the art, and generally is an empirical calculation dependent upon probe length, washing temperature, and salt concentration. In general, longer probes require higher temperatures for proper annealing, while shorter probes need lower temperatures. Hybridization generally depends on the ability of denatured DNA to re-anneal when complementary strands are present in an environment below their melting temperature. The higher the degree of desired homology between the probe and hybridizable sequence, the higher the relative temperature that may be used. As a result, it follows that higher relative temperatures may tend to make the reaction conditions more stringent, while lower temperatures less so. For additional details and explanation of stringency of hybridization reactions, see Ausubel et al., 1995.

[0080] “Stringent conditions” or “high stringency conditions”, as defined herein, typically: (1) employ low ionic strength solutions and high temperature for washing, for example 0.015 M sodium chloride/0.0015 M sodium citrate/0.1% sodium dodecyl sulfate at 50° C.; (2) employ during hybridization a denaturing agent, such as formamide, for example, 50% (v/v) formamide with 0.1% bovine serum albumin/0.1% Ficoll/0.1% polyvinylpyrrolidone/50 mM sodium phosphate buffer at pH 6.5 with 750 mM sodium chloride, 75 mM sodium citrate at 42° C.; or (3) employ 50% formamide, 5× SSC (0.75 M NaCl, 0.075 M sodium citrate), 50 mM sodium phosphate (pH 6.8), 0.1% sodium pyrophosphate, 5× Denhardt’s solution, sonicated salmon sperm DNA (50 µg/ml), 0.1% SDS, and 10% dextran sulfate at 42° C., with washes at 42° C. in 0.2× SSC (sodium chloride/sodium citrate) and 50% formamide at 55° C., followed by a high-stringency wash consisting of 0.1× SSC containing EDTA at 55° C.

[0081] “Moderately stringent conditions” may be identified as described by Sambrook et al., 1989, and include the use of washing solution and hybridization conditions (e.g., temperature, ionic strength and % SDS) less stringent that those described above. An example of moderately stringent condition is overnight incubation at 37° C. in a solution comprising: 20% formamide, 5×SSC (150 mM NaCl, 15 mM trisodium citrate), 50 mM sodium phosphate (pH 7.6), 5×Denhardt’s solution, 10% dextran sulfate, and 20 mg/ml denatured sheared salmon sperm DNA, followed by washing the filters in 1×SSC at about 37-50° C. The skilled artisan will recognize how to adjust the temperature, ionic strength, etc. as necessary to accommodate factors such as probe length and the like.

[0082] “Sensitivity” as used herein refers to the proportion of true positives of the total number tested that actually have the target disorder (i.e., the proportion of patients with the target disorder who have a positive test result). “Specificity” as used herein refers to the proportion of true negatives of all the patients tested who actually do not have the target disorder (i.e., the proportion of patients without the target disorder who have a negative test result).

[0083] In the context of the present disclosure, reference to “at least one,” “at least two,” “at least five,” etc. of the genes listed in any particular gene set means any one or any and all combinations of the genes listed.

[0084] The term “modulate”, as used herein, refers to changing the level of an activity, function, or process. The term “modulate” encompasses both inhibiting and stimulating an activity, function, or process. The term “modulate” is used interchangeably with the term “regulate” herein.

[0085] The term “nucleic acid” typically refers to large polynucleotides. By “nucleic acid” is meant any nucleic acid, whether composed of deoxyribonucleosides or ribonucleosides, and whether composed of phosphodiester linkages or modified linkages such as phosphotriester, phosphoramidate, siloxane, carbonate, carboxymethylester, acetamidate, carbamate, thioether, bridged phosphoramidate, bridged methylene phosphonate, bridged phosphoramidate, bridged phosphoramidate, bridged methylene phosphonate, phosphorothioate, methylphosphonate, phosphorodithioate, bridged phosphorothioate or sulfone linkages, and combinations of such linkages. The term nucleic acid also specifically includes nucleic acids composed of bases other than the five biologically occurring bases (adenine, guanine, thymine, cytosine, and uracil).

[0086] As used herein, the term “nucleic acid” encompasses RNA as well as single and double stranded DNA and cDNA. Furthermore, the terms, “nucleic acid”, “DNA”, “RNA” and similar terms also include nucleic acid analogs, i.e. analogs having other than a phosphodiester backbone. For example, the so called “peptide nucleic acids”, which are known in the art and have peptide bonds instead of phosphodiester bonds in the backbone, are considered within the scope of the presently disclosed subject matter. By “nucleic acid” is meant any nucleic acid, whether composed of deoxyribonucleosides or ribonucleosides, and whether composed of phosphodiester linkages or modified linkages such as phosphotriester, phosphoramidate, siloxane, carbonate, carboxymethylester, acetamidate, carbamate, thioether, bridged phosphoramidate, bridged methylene phosphonate, bridged phosphoramidate, bridged phosphoramidate, bridged methylene phosphonate, phosphorothioate, methylphosphonate, phosphorodithioate, bridged phosphorothioate or sulfone linkages, and combinations of such linkages. The term nucleic acid also specifically includes nucleic acids composed of bases other than the five biologically occurring bases (adenine, guanine, thymine, cytosine, and uracil). Conventional notation is used herein to describe polynucleotide sequences: the left-hand end of a single-stranded polynucleotide sequence is the 5ʹ-end; the left-hand direction of a double-stranded polynucleotide sequence is referred to as the 5ʹ-direction. The direction of 5ʹ to 3ʹ addition of nucleotides to nascent RNA transcripts is referred to as the transcription direction. The DNA strand having the same sequence as an mRNA is referred to as the “coding strand”; sequences on the DNA strand which are located 5’ to a reference point on the DNA are referred to as “upstream sequences”; sequences on the DNA strand which are 3ʹ to a reference point on the DNA are referred to as “downstream sequences”.

[0087] The term “nucleic acid construct”, as used herein, encompasses DNA and RNA sequences encoding the particular gene or gene fragment desired, whether obtained by genomic or synthetic methods.

[0088] Unless otherwise specified, a “nucleotide sequence encoding an amino acid sequence” includes all nucleotide sequences that are degenerate versions of each other and that encode the same amino acid sequence. Nucleotide sequences that encode proteins and RNA may include introns.

[0089] The term “oligonucleotide” typically refers to short polynucleotides, generally, no greater than about 50 nucleotides. It will be understood that when a nucleotide sequence is represented by a DNA sequence (i.e., A, T, G, C), this also includes an RNA sequence (i.e., A, U, G, C) in which “U” replaces “T”.

[0090] By describing two polynucleotides as “operably linked” is meant that a single-stranded or double-stranded nucleic acid moiety comprises the two polynucleotides arranged within the nucleic acid moiety in such a manner that at least one of the two polynucleotides is able to exert a physiological effect by which it is characterized upon the other. By way of example, a promoter operably linked to the coding region of a gene is able to promote transcription of the coding region.

[0091] The term “pharmaceutical composition” shall mean a composition comprising at least one active ingredient, whereby the composition is amenable to investigation for a specified, efficacious outcome in a mammal (for example, without limitation, a human). Those of ordinary skill in the art will understand and appreciate the techniques appropriate for determining whether an active ingredient has a desired efficacious outcome based upon the needs of the artisan.

[0092] As used herein, the term “pharmaceutically-acceptable carrier” means a chemical composition with which an appropriate compound or derivative can be combined and which, following the combination, can be used to administer the appropriate compound to a subject.

[0093] As used herein, the term “physiologically acceptable” ester or salt means an ester or salt form of the active ingredient which is compatible with any other ingredients of the pharmaceutical composition, which is not deleterious to the subject to which the composition is to be administered.

[0094] “Plurality” means at least two.

[0095] A “polynucleotide” means a single strand or parallel and anti-parallel strands of a nucleic acid. Thus, a polynucleotide may be either a single-stranded or a double-stranded nucleic acid.

[0096] “Polypeptide” refers to a polymer composed of amino acid residues, related naturally occurring structural variants, and synthetic non-naturally occurring analogs thereof linked via peptide bonds, related naturally occurring structural variants, and synthetic non-naturally occurring analogs thereof.

[0097] “Synthetic peptides or polypeptides” means a non-naturally occurring peptide or polypeptide. Synthetic peptides or polypeptides can be synthesized, for example, using an automated polypeptide synthesizer. Various solid phase peptide synthesis methods are known to those of skill in the art.

[0098] The term “prevent”, as used herein, means to stop something from happening, or taking advance measures against something possible or probable from happening. In the context of medicine, “prevention” generally refers to action taken to decrease the chance of getting a disease or condition.

[0099] “Primer” refers to a polynucleotide that is capable of specifically hybridizing to a designated polynucleotide template and providing a point of initiation for synthesis of a complementary polynucleotide. Such synthesis occurs when the polynucleotide primer is placed under conditions in which synthesis is induced, i.e., in the presence of nucleotides, a complementary polynucleotide template, and an agent for polymerization such as DNA polymerase. A primer is typically single-stranded, but may be double-stranded. Primers are typically deoxyribonucleic acids, but a wide variety of synthetic and naturally occurring primers are useful for many applications. A primer is complementary to the template to which it is designed to hybridize to serve as a site for the initiation of synthesis, but need not reflect the exact sequence of the template. In such a case, specific hybridization of the primer to the template depends on the stringency of the hybridization conditions. Primers can be labeled with, e.g., chromogenic, radioactive, or fluorescent moieties and used as detectable moieties.

[0100] A “prophylactic” treatment is a treatment administered to a subject who does not exhibit signs of a disease or injury or exhibits only early signs of the disease or injury for the purpose of decreasing the risk of developing pathology associated with the disease or injury.

[0101] As used herein, “protecting group” with respect to a terminal amino group refers to a terminal amino group of a peptide, which terminal amino group is coupled with any of various amino-terminal protecting groups traditionally employed in peptide synthesis. Such protecting groups include, for example, acyl protecting groups such as formyl, acetyl, benzoyl, trifluoroacetyl, succinyl, and methoxysuccinyl; aromatic urethane protecting groups such as benzyloxycarbonyl; and aliphatic urethane protecting groups, for example, tert-butoxycarbonyl or adamantyloxycarbonyl. See Gross & Mienhofer, 1981 for suitable protecting groups.

[0102] As used herein, “protecting group” with respect to a terminal carboxy group refers to a terminal carboxyl group of a peptide, which terminal carboxyl group is coupled with any of various carboxyl-terminal protecting groups. Such protecting groups include, for example, tert-butyl, benzyl, or other acceptable groups linked to the terminal carboxyl group through an ester or ether bond.

[0103] The term “protein” typically refers to large polypeptides. Conventional notation is used herein to portray polypeptide sequences: the left-hand end of a polypeptide sequence is the amino-terminus; the right-hand end of a polypeptide sequence is the carboxyl-terminus.

[0104] The term “protein regulatory pathway”, as used herein, refers to both the upstream regulatory pathway which regulates a protein, as well as the downstream events which that protein regulates. Such regulation includes, but is not limited to, transcription, translation, levels, activity, posttranslational modification, and function of the protein of interest, as well as the downstream events which the protein regulates.

[0105] The terms “protein pathway” and “protein regulatory pathway” are used interchangeably herein.

[0106] As used herein, the term “purified” and like terms relate to an enrichment of a molecule or compound relative to other components normally associated with the molecule or compound in a native environment. The term “purified” does not necessarily indicate that complete purity of the particular molecule has been achieved during the process. A “highly purified” compound as used herein refers to a compound that is greater than 90% pure.

[0107] “Recombinant polynucleotide” refers to a polynucleotide having sequences that are not naturally joined together. An amplified or assembled recombinant polynucleotide may be included in a suitable vector, and the vector can be used to transform a suitable host cell.

[0108] A recombinant polynucleotide may serve a non-coding function (e.g., promoter, origin of replication, ribosome-binding site, etc.) as well.

[0109] A host cell that comprises a recombinant polynucleotide is referred to as a “recombinant host cell”. A gene which is expressed in a recombinant host cell wherein the gene comprises a recombinant polynucleotide, produces a “recombinant polypeptide”.

[0110] A “recombinant polypeptide” is one which is produced upon expression of a recombinant polynucleotide.

[0111] The term “regulate” refers to either stimulating or inhibiting a function or activity of interest.

[0112] As used herein, term “regulatory elements” is used interchangeably with “regulatory sequences” and refers to promoters, enhancers, and other expression control elements, or any combination of such elements.

[0113] A “significant detectable level” is an amount of contaminate that would be visible in the presented data and would need to be addressed/explained during analysis of the forensic evidence.

[0114] By the term “signal sequence” is meant a polynucleotide sequence which encodes a peptide that directs the path a polypeptide takes within a cell, i.e., it directs the cellular processing of a polypeptide in a cell, including, but not limited to, eventual secretion of a polypeptide from a cell. A signal sequence is a sequence of amino acids which are typically, but not exclusively, found at the amino terminus of a polypeptide which targets the synthesis of the polypeptide to the endoplasmic reticulum. In some instances, the signal peptide is proteolytically removed from the polypeptide and is thus absent from the mature protein.

[0115] By “small interfering RNAs (siRNAs)” is meant, inter alia, an isolated dsRNA molecule comprised of both a sense and an anti-sense strand. In some embodiments, it is greater than 10 nucleotides in length. siRNA also refers to a single transcript which has both the sense and complementary antisense sequences from the target gene, e.g., a hairpin. siRNA further includes any form of dsRNA (proteolytically cleaved products of larger dsRNA, partially purified RNA, essentially pure RNA, synthetic RNA, recombinantly produced RNA) as well as altered RNA that differs from naturally occurring RNA by the addition, deletion, substitution, and/or alteration of one or more nucleotides.

[0116] The terms “solid support”, “surface” and “substrate” are used interchangeably and refer to a structural unit of any size, where said structural unit or substrate has a surface suitable for immobilization of molecular structure or modification of said structure and said substrate is made of a material such as, but not limited to, metal, metal films, glass, fused silica, synthetic polymers, and membranes.

[0117] By the term “specifically binds”, as used herein, is meant a molecule which recognizes and binds a specific molecule, but does not substantially recognize or bind other molecules in a sample, or it means binding between two or more molecules as in part of a cellular regulatory process, where said molecules do not substantially recognize or bind other molecules in a sample.

[0118] The term “standard”, as used herein, refers to something used for comparison. For example, it can be a known standard agent or compound which is administered and used for comparing results when administering a test compound, or it can be a standard parameter or function which is measured to obtain a control value when measuring an effect of an agent or compound on a parameter or function. “Standard” can also refer to an “internal standard”, such as an agent or compound which is added at known amounts to a sample and which is useful in determining such things as purification or recovery rates when a sample is processed or subjected to purification or extraction procedures before a marker of interest is measured. Internal standards are often but are not limited to, a purified marker of interest which has been labeled, such as with a radioactive isotope, allowing it to be distinguished from an endogenous substance in a sample.

[0119] The term “stimulate” as used herein, means to induce or increase an activity or function level such that it is higher relative to a control value. The stimulation can be via direct or indirect mechanisms. In some embodiments, the activity or function is stimulated by at least 10% compared to a control value, in some embodiments by at least 25%, and in some embodiments by at least 50%. The term “stimulator” as used herein, refers to any composition, compound or agent, the application of which results in the stimulation of a process or function of interest, including, but not limited to, wound healing, angiogenesis, bone healing, osteoblast production and function, and osteoclast production, differentiation, and activity.

[0120] The term “subject,” as used herein, generally refers to a mammal. Typically, the subject is a human. However, the term embraces other species, e.g., pigs, mice, rats, dogs, cats, or other primates. In certain embodiments, the subject is an experimental subject such as a mouse or rat. The subject may be a male or female. The subject may be an infant, a toddler, a child, a young adult, an adult or a geriatric. The subject may exhibit one or more symptoms of IPF. For example, the subject may exhibit shortness of breath (generally aggravated by exertion) and/or dry cough), and, in some cases may have obtained results of one or more of an imaging test (e.g., chest X-ray, computerized tomography (CT)), a pulmonary function test (e.g., spirometry, oximetry, exercise stress test), lung tissue analysis (e.g., histological and/or cytological analysis of samples obtained by bronchoscopy, bronchoalveolar lavage, surgical biopsy) that is indicative of the potential presence of IPF. A subject under the care of a physician or other health care provider may be referred to as a “patient”.

[0121] A “subject” of diagnosis or treatment is an animal, including a human. It also includes pets and livestock.

[0122] As used herein, a “subject in need thereo” is a patient, animal, mammal, or human, who will benefit from the method of the presently disclosed subject matter.

[0123] As used herein, “substantially homologous amino acid sequences” includes those amino acid sequences which have at least about 95% homology, in some embodiments at least about 96% homology, more in some embodiments at least about 97% homology, in some embodiments at least about 98% homology, and most in some embodiments at least about 99% or more homology to an amino acid sequence of a reference sequence. Amino acid sequence similarity or identity can be computed by using the BLASTP and TBLASTN programs which employ the BLAST (basic local alignment search tool) 2.0.14. algorithm. The default settings used for these programs are suitable for identifying substantially similar amino acid sequences for purposes of the presently disclosed subject matter.

[0124] “Substantially homologous nucleic acid sequence” means a nucleic acid sequence corresponding to a reference nucleic acid sequence wherein the corresponding sequence encodes a peptide having substantially the same structure and function as the peptide encoded by the reference nucleic acid sequence; e.g., where only changes in amino acids not significantly affecting the peptide function occur. In some embodiments, the substantially identical nucleic acid sequence encodes the peptide encoded by the reference nucleic acid sequence. The percentage of identity between the substantially similar nucleic acid sequence and the reference nucleic acid sequence is at least about 50%, 65%, 75%, 85%, 95%, 99% or more. Substantial identity of nucleic acid sequences can be determined by comparing the sequence identity of two sequences, for example by physical/chemical methods (i.e., hybridization) or by sequence alignment via computer algorithm. Suitable nucleic acid hybridization conditions to determine if a nucleotide sequence is substantially similar to a reference nucleotide sequence are: 7% sodium dodecyl sulfate SDS, 0.5 M NaPO4, 1 mM EDTA at 50° C. with washing in 2X standard saline citrate (SSC), 0.1% SDS at 50° C.; in some embodiments in 7% (SDS), 0.5 M NaPO4, 1 mM EDTA at 50° C. with washing in 1X SSC, 0.1% SDS at 50° C.; in some embodiments 7% SDS, 0.5 M NaPO4, 1 mM EDTA at 50° C. with washing in 0.5X SSC, 0.1% SDS at 50° C.; and more in some embodiments in 7% SDS, 0.5 M NaPO4, 1 mM EDTA at 50° C. with washing in 0.1X SSC, 0.1% SDS at 65° C. Suitable computer algorithms to determine substantial similarity between two nucleic acid sequences include, GCS program package (Devereux et al., 1984), and the BLASTN or FASTA programs (Altschul et al., 1990a; Altschul et al., 1990b; Altschul et al., 1997). The default settings provided with these programs are suitable for determining substantial similarity of nucleic acid sequences for purposes of the presently disclosed subject matter.

[0125] The term “substantially pure” describes a compound, e.g., a protein or polypeptide which has been separated from components which naturally accompany it. Typically, a compound is substantially pure when at least 10%, more in some embodiments at least 20%, more in some embodiments at least 50%, more in some embodiments at least 60%, more in some embodiments at least 75%, more in some embodiments at least 90%, and most in some embodiments at least 99% of the total material (by volume, by wet or dry weight, or by mole percent or mole fraction) in a sample is the compound of interest. Purity can be measured by any appropriate method, e.g., in the case of polypeptides by column chromatography, gel electrophoresis, or HPLC analysis. A compound, e.g., a protein, is also substantially purified when it is essentially free of naturally associated components or when it is separated from the native contaminants which accompany it in its natural state.

[0126] A “surface active agent” or “surfactant” is a substance that has the ability to reduce the surface tension of materials and enable penetration into and through materials.

[0127] The term “symptom”, as used herein, refers to any morbid phenomenon or departure from the normal in structure, function, or sensation, experienced by the patient and indicative of disease. In contrast, a “sign” is objective evidence of disease. For example, a bloody nose is a sign. It is evident to the patient, doctor, nurse, and other observers.

[0128] A “therapeutic” treatment is a treatment administered to a subject who exhibits signs of pathology for the purpose of diminishing or eliminating those signs.

[0129] A “therapeutically effective amount” of a compound is that amount of compound which is sufficient to provide a beneficial effect to the subject to which the compound is administered.

[0130] “Tissue” means (1) a group of similar cell united perform a specific function; (2) a part of an organism consisting of an aggregate of cells having a similar structure and function; or (3) a grouping of cells that are similarly characterized by their structure and function, such as muscle or nerve tissue.

[0131] The term “transfection” is used interchangeably with the terms “gene transfer”, “transformation”, and “transduction”, and means the intracellular introduction of a polynucleotide. “Transfection efficiency” refers to the relative amount of the transgene taken up by the cells subjected to transfection. In practice, transfection efficiency is estimated by the amount of the reporter gene product expressed following the transfection procedure.

[0132] As used herein, the term “transgene” means an exogenous nucleic acid sequence comprising a nucleic acid which encodes a promoter/regulatory sequence operably linked to nucleic acid which encodes an amino acid sequence, which exogenous nucleic acid is encoded by a transgenic mammal.

[0133] As used herein, the term “treating” may include prophylaxis of the specific injury, disease, disorder, or condition, or alleviation of the symptoms associated with a specific injury, disease, disorder, or condition and/or preventing or eliminating said symptoms. A “prophylactic” treatment is a treatment administered to a subject who does not exhibit signs of a disease or exhibits only early signs of the disease for the purpose of decreasing the risk of developing pathology associated with the disease. “Treating” is used interchangeably with “treatment” herein.

[0134] A “vector” is a composition of matter which comprises an isolated nucleic acid and which can be used to deliver the isolated nucleic acid to the interior of a cell. Numerous vectors are known in the art including, but not limited to, linear polynucleotides, polynucleotides associated with ionic or amphiphilic compounds, plasmids, and viruses. Thus, the term “vector” includes an autonomously replicating plasmid or a virus. The term should also be construed to include non-plasmid and non-viral compounds which facilitate transfer or delivery of nucleic acid to cells, such as, for example, polylysine compounds, liposomes, and the like. Examples of viral vectors include, but are not limited to, adenoviral vectors, adeno-associated virus vectors, retroviral vectors, recombinant viral vectors, and the like. Examples of non-viral vectors include, but are not limited to, liposomes, polyamine derivatives of DNA and the like.

[0135] “Expression vector” refers to a vector comprising a recombinant polynucleotide comprising expression control sequences operatively linked to a nucleotide sequence to be expressed. An expression vector comprises sufficient cis-acting elements for expression; other elements for expression can be supplied by the host cell or in an in vitro expression system. Expression vectors include all those known in the art, such as cosmids, plasmids (e.g., naked or contained in liposomes) and viruses that incorporate the recombinant polynucleotide.

### II. Exemplary Embodiments

[0136] A method of detecting an extrachromosomal circular DNA (eccDNA) in a biological sample is provided in accordance with the presently disclosed subject matter. In some embodiments, the method comprises treating the biological sample to produce a tagged linearized fragment of genomic DNA; and determining whether the tagged linearized fragment is derived from an eccDNA to thereby detect the eccDNA. In some embodiments, the genomic DNA comprises accessible chromatin or whole genome or exonuclease resistant DNA from the cells. In some embodiments, the biological sample is treated with a restriction enzyme and ligated to sequencing primers to produce a tagged linearized fragment of genomic DNA. In some embodiments, the fragments are sequenced by high throughput sequencing to identify the junctional sequence that indicates the presence of an eccDNA.

[0137] Any suitable restriction enzyme (also referred to as restriction endonucleases) and suitable reaction conditions and reagents as would be apparent to one of ordinary skill in the art upon a review on the instant disclosure can be employed. Restriction endonucleases are available from many commercial sources, such as Thermo Fisher Scientific and Sigma Aldrich. By way of example and not limitation, Type I, Type II, Type III, and/or Type IV restriction enzymes can be employed. Additional specific no limiting examples include Asc1, EcoR1, HindIII, and/or XhoI restriction enzymes can be employed.

[0138] Ligation can be accomplished either enzymatically or chemically. “Ligation” means to form a covalent bond or linkage between the termini of two or more nucleic acids, e.g., oligonucleotides and/or polynucleotides, in a template-driven reaction. The nature of the bond or linkage may vary widely and the ligation may be carried out enzymatically or chemically. As used herein, ligations are usually carried out enzymatically to form a phosphodiester linkage between 5ʹ carbon of a terminal nucleotide of the tagged fragment of genomic DNA with the 3ʹ carbon of the tagged fragment of genomic DNA.

[0139] A variety of template-driven ligation reactions are described in the following references: Whitely et al., U.S. Pat. No. 4,883,750; Letsinger et al., U.S. Pat. No. 5,476,930; Fung et al., U.S. Pat. No. 5,593,826; Kool, U.S. Pat. No. 5,426,180; Landegren et al., U.S. Pat. No. 5,871,921; Xu and Kool (1999) Nucl. Acids Res. 27:875; Higgins et al., Meth. in Enzymol. (1979) 68:50; Engler et al. (1982) The Enzymes, 15:3 (1982); and Namsaraev, U.S. Pat. Pub. 2004/0110213.

[0140] Chemical ligation methods are disclosed in Ferris et al., Nucleosides & Nucleotides, 8: 407-414 (1989) and Shabarova et al., Nucleic Acids research, 19: 4247-4251 (1991). Enzymatic ligation utilizes a ligase. Many ligases are known to those of skill in the art as referenced in Lehman, Science, 186: 790-797 (1974); Engler et al., DNA ligases, pages 3-30 in Boyer, editor, The Enzymes, Vol. 15B (Academic Press, New York, 1982); and the like. Exemplary ligases include SplintR ligase, T4 DNA ligase, T7 DNA ligase, E.coli DNA ligase, Taq ligase, Pfu ligase and the like. Certain protocols for using ligases are disclosed by the manufacturer and also in Sambrook, Molecular Cloning: A Laboratory manual, 2^{nd} Edition (Cold Spring Harbor Laboratory, New York, 1989); Barany, PCR Methods and Applications, 1:5-16 (1991); Marsh et al., Strategies, 5:73-76 (1992). In one embodiment, the ligase may be derived from algal viruses such as the Chlorella virus, for example, PBCV-1 ligase, also known as SplintR ligase, as described U.S. Pat. Publication No. 2014/0179539, incorporated herein by reference in its entirety.

[0141] In some embodiments, the treating of the biological sample to produce a tagged linearized fragment of genomic DNA comprises treating the biological sample with an insertional enzyme complex to produce a tagged linearized fragment of genomic DNA. In some embodiments, the method comprises treating the sample with an exonuclease prior to treating the biological sample with an insertional enzyme complex to produce a tagged linearized fragment that is enriched from eccDNA. In some embodiments, the method comprises treating the sample with an exonuclease prior to treating the biological sample with restriction enzyme and ligation of sequencing primers to produce a tagged linearized fragment that is enriched from eccDNA.

[0142] In some embodiments, the presently disclosed subject matter provides for analyzing a sample from a subject to detect eccDNA; and providing a diagnosis or prognosis based on the detected eccDNA. In some embodiments, providing a diagnosis or prognosis comprises identifying a cell type in the subject, identifying a cell population, identifying a tissue type; and/or identifying a nucleic acid sequence on the eccDNA. In some embodiments, the method further comprises choosing a therapy based on the diagnosis or prognosis, optionally based on the identified cell type, cell population, tissue type, or nucleic acid. In some embodiments, this approach is used to monitor a therapeutic treatment in a subject. In some embodiments the method comprises administering the therapy to the subject. Representative non-limiting genes for analysis are provided in the Examples.

[0143] In some embodiments, the presently disclosed subject matter provides a method of detecting a cell type, a population of cells, or a tissue type in a subject. In some embodiments, the method comprises (a) detecting an extrachromosomal circular DNA (eccDNA) in a biological sample from the subject by: (i) treating the biological sample to produce a tagged linearized fragment of genomic DNA; and (ii) determining whether the tagged linearized fragment is derived from an eccDNA to thereby detect the eccDNA; and (b) determining a genomic region from which the eccDNA is derived to thereby detect a population of cells or a tissue type in a subject. In some embodiments, treating the biological sample to produce a tagged linearized fragment of genomic eccDNA comprises treating the biological sample with an exonuclease to digest genomic linear DNA and then with an insertional enzyme complex to produce a tagged linearized fragment of genomic DNA. In some embodiments, this approach is used to monitor a therapeutic treatment in a subject and/or to choose a therapy for the subject. In some embodiments the method comprises administering the therapy to the subject. Representative non limiting genes for analysis are disclosed in the Examples.

[0144] In some embodiments, the presently disclosed subject matter provides a method of detecting a nucleic acid sequence associated with a condition in a subject. In some embodiments, the method comprises (a) detecting an extrachromosomal circular DNA (eccDNA) in a sample from the subject by: (i) treating the biological sample to produce a tagged linearized fragment of genomic DNA; and (ii) determining whether the tagged linearized fragment is derived from an eccDNA to thereby detect the eccDNA; and (b) detecting a presence of a nucleic acid sequence on the eccDNA, wherein the nucleic acid sequence is associated with a condition in the subject. In some embodiments, treating the biological sample to produce a tagged linearized fragment of genomic eccDNA comprises treating the biological sample with an exonuclease to digest genomic linear DNA and then with an insertional enzyme complex to produce a tagged linearized fragment of genomic DNA. In some embodiments, this approach is used to monitor a therapeutic treatment in the subject. In some embodiments the method comprises administering the therapy to the subject. Representative non-limiting genes for analysis are disclosed in the EXAMPLES. In some embodiments, the condition comprises a disease or disorder as described herein

[0145] The term “insertional enzyme complex,” as used herein, refers to a complex comprising an insertional enzyme and two adaptor molecules (also referred to as the “molecular tags” or “transposon tags”) that are combined with polynucleotides to fragment and add adaptors to the polynucleotides. Such a system is described in a variety of publications, including Caruccio (Methods Mol. Biol. 2011 733: 241-55), US20100120098 and US20160060691, which are incorporated by reference herein. The insertional enzyme can be a transposase. In some embodiments, the transposase can be derived from Tn5 transposase. In other embodiments, the transposase can be derived from MuA transposase. In further embodiments, the transposase can be derived from Vibhar transposase (e.g. from Vibrioharveyi). In some embodiments, the insertional enzyme can comprise two or more enzymatic moieties wherein each of the enzymatic moieties inserts a common sequence into the genomic DNA. The enzymatic moieties can be linked together. The common sequence can comprise a common barcode. The enzymatic moieties can comprise transposases. The genomic DNA can be fragmented into a plurality of fragments.

[0146] The term “insertional enzyme complex,” as used herein, refers to a complex comprising an insertional enzyme and at least two adaptor molecules (the “transposon tags”) that are combined with polynucleotides to fragment and add adaptors to the polynucleotides. In some embodiments, the genomic DNA can be fragmented into a plurality of fragments during the insertion of the molecular tags. In this step, the genomic DNA is tagmented (i.e., cleaved and tagged in the same reaction) using an insertional enzyme such as a transposase that cleaves the genomic DNA in open regions in the chromatin and adds adaptors to both ends of the fragments. Methods for tagmenting isolated genomic DNA are known in the art (see, e.g., Caruccio Methods Mol. Biol. 2011 733: 241-55; Kaper et al, Proc. Natl. Acad. Sci. 2013 110: 5552-7; Marine et al, Appl. Environ. Microbiol. 2011 77: 8071-9, US20100120098, US20160060691, US2019/0032128) and are commercially available from Illumina (San Diego, Calif.) and other vendors. Such systems may be readily adapted for use herein. In some cases, the conditions may be adjusted to obtain a desirable level of insertion in the genomic DNA (e.g., an insertion that occurs, on average, every 50 to 200 base pairs in open regions). Other approaches are disclosed in the EXAMPLES set forth herein below.

[0147] The insertional enzyme can be any enzyme capable of inserting a nucleic acid sequence into a polynucleotide. In some cases, the insertional enzyme can insert the nucleic acid sequence into the polynucleotide in a substantially sequence-independent manner. The insertional enzyme can be prokaryotic or eukaryotic. Examples of insertional enzymes include, but are not limited to, transposases, HERMES, and HIV integrase. The transposase can be a Tn transposase (e.g., Tn3, Tn5, Tn7, Tn10, Tn552, Tn903), a MuA transposase, a Vibhar transposase (e.g., from Vibrioharveyi), Ac-Ds, Ascot-1, Bs1, Cin4, Copia, En/Spm, F element, hobo, Hsmar1, Hsmar2, IN (HIV), IS1, IS2, IS3, IS4, IS5, IS6, IS10, IS21, IS30, IS50, IS51, IS150, IS256, IS407, IS427, IS630, IS903, IS911, IS982, IS1031, ISL2, L1, Mariner, P element, Tam3, Tc1, Tc3, Te1, THE-1, Tn/O, TnA, Tn3, Tn5, Tn7, Tn10, Tn552, Tn903, Toll, Tol2, Tn1O, Ty1, any prokaryotic transposase, or any transposase related to and/or derived from those listed above. In certain instances, a transposase related to and/or derived from a parent transposase can comprise a peptide fragment with at least about 50%, about 55%, about 60%, about 65%, about 70%, about 75%, about 80%, about 85%, about 90%, about 91%, about 92%, about 93%, about 94%, about 95%, about 96%, about 97%, about 98%, or about 99% amino acid sequence homology to a corresponding peptide fragment of the parent transposase. The peptide fragment can be at least about 10, about 15, about 20, about 25, about 30, about 35, about 40, about 45, about 50, about 60, about 70, about 80, about 90, about 100, about 150, about 200, about 250, about 300, about 400, or about 500 amino acids in length. For example, a transposase derived from Tn5 can comprise a peptide fragment that is 50 amino acids in length and about 80% homologous to a corresponding fragment in a parent Tn5 transposase. In some cases, the insertion can be facilitated and/or triggered by addition of one or more cations. The cations can be divalent cations such as, for example, Ca²⁺, Mg²⁺ and Mn²⁺.

[0148] The adaptor molecules can comprise additional sequences that can be used for ligations, digestion, amplification, detection and/or sequencing. Such additional sequences can include, but are not limited to, sequencing adaptors, primer binding sites, locked nucleic acids (LNAs), zip nucleic acids (ZNAs), RNAs, affinity reactive molecules (e.g., biotin, dig), self-complementary molecules, phosphorothioate modifications, DNA tags, barcodes, and azide or alkyne groups. In some embodiments, the sequencing adaptors can further comprise a barcode label. Further, the barcode labels can comprise a unique sequence. The unique sequences can be used to identify the individual insertion events. Any of the tags can further comprise fluorescence tags (e.g., fluorescein, rhodamine, Cy3, Cy5, thiazole orange, etc.).

[0149] In some embodiments, the adaptor molecules can comprise unmodified DNA oligonucleotides. Examples of such unmodified DNA oligonucleotides include, but are not limited to, oligonucleotides consisting of the 19 basepair mosaic end Tn5 transposase recognition sequence, oligonucleotides which contain the recognition sequence as a subsequence as well as containing an additional sequence as a subsequence (e.g., Illumina Read 1 or Read 2 or any user-defined sequence). In some embodiments, the adaptor molecules can comprise modified DNA oligonucleotides. As used herein, “modified DNA oligonucleotides” refer to oligonucleotides which contain a chemical modification on the 5ʹ end, the 3ʹ end, or internally, and/or oligonucleotides that incorporate non-standard DNA bases (e.g., uracil, xeno-nucleic acids). Examples of such modified DNA oligonucleotides include, but are not limited to, 5ʹ or 3ʹ phosphorylation, 5ʹ acrydite modification, internal methacrylate functionalized uracil.

[0150] Additionally, the insertional enzyme complex can further comprise an affinity tag. In some cases, the affinity tag can be an antibody. The antibody can bind to, for example, a transcription factor, a modified nucleosome or a modified nucleic acid. Examples of modified nucleic acids include, but are not limited to, methylated or hydroxymethylated DNA. In other cases, the affinity tag can be a single-stranded nucleic acid (e.g., ssDNA, ssRNA). In some examples, the single-stranded nucleic acid can bind to a target nucleic acid. In further cases, the insertional enzyme complex can further comprise a nuclear localization signal.

[0151] In some embodiments, determining whether the tagged linearized fragment is derived from an eccDNA comprises amplifying the tagged linearized fragment of genomic DNA. Thus, in some embodiments, the method further comprises amplifying the tagged fragments of genomic DNA. The expression “amplification” or “amplifying” refers to a process by which extra or multiple copies of a particular polynucleotide are formed. The term “amplification product” refers to the nucleic acids, which are produced from the amplifying process as defined herein.

[0152] Amplification includes methods generally known to one skilled in the art such as, but not limited to, PCR, ligation amplification (or ligase chain reaction, LCR), real time (rtPCR) or quantitative PCR (qPCR), and other amplification methods. These methods are generally known. See, e.g., U.S. Pat. Nos. 4,683,195 and 4,683,202 and Innis et al., “PCR protocols: a guide to method and applications” Academic Press, Incorporated (1990) (for PCR); and Wu et al. (1989) Genomics 4:560-569 (for LCR). In one embodiment, the ligation product is amplified using PCR. In general, the PCR procedure describes a method of gene amplification which comprises (i) sequence-specific hybridization of primers to specific genes within a DNA sample (or library), (ii) subsequent amplification involving multiple rounds of annealing, elongation, and denaturation using a DNA polymerase, and (iii) screening the PCR products for a band of the correct size. The primers used are oligonucleotides of sufficient length and appropriate sequence to provide initiation of polymerization, i.e., each primer is specifically designed to be complementary to each strand of the genomic locus to be amplified. In some embodiments, the tagged fragments of genomic DNA are amplified using qPCR. Quantitative polymerase chain reaction is used to simultaneously detect a specific DNA sequence in a sample and determine the actual copy number of this sequence relative to a standard. In some embodiments, the tagged fragments of genomic DNA are amplified using rtPCR. In real-time PCR, the DNA copy number can be established after each cycle of amplification. By using a fluorescent reporter in the reaction, it is possible to measure DNA generation. Additional representative approaches for amplification are disclosed in the EXAMPLES set forth herein below.

[0153] In some embodiments, the determining whether the tagged linearized fragment is derived from an eccDNA comprises sequencing the tagged linearized fragment of genomic DNA. The fragments can be sequenced using any convenient method and can be sequenced prior to or after an amplification step, again using any convenient method. The term “sequencing,” as used herein, refers to a method by which the identity of at least 10 consecutive nucleotides (e.g., the identity of at least 20, at least 50, at least 100 or at least 200 or more consecutive nucleotides) of a polynucleotide is obtained. Sequencing can be carried out by any method known in the art including, but not limited to, sequencing by hybridization, sequencing by ligation or sequencing by synthesis. Sequencing by ligation includes, but is not limited to, fluorescent in situ sequencing (FISSEQ). Sequencing by synthesis includes, but is not limited to, reversible terminator chemistry (i.e. Illumina SBS). Other sequencing approaches are described in the EXAMPLES provided herein below.

[0154] In some embodiments, the tagged fragments can be sequenced to generate a plurality of sequencing reads. The fragments may be sequenced using a high-throughput sequencing technique. In some cases, the sequencing reads can be normalized based on the sequence insertion preference of the insertional enzyme. The sequencing reads can be used to determine the accessibility of the polynucleotide at any given site. In some embodiments, the length of the sequenced reads can be used to determine can be used to detect or determine a genomic region of origin for the eccDNA and/or can also be used to detect or determine the presence of a cell type, population of cells, and/or tissue type in the subject, such as the presence of cancer. For example, cancers are different from normal cells in having long eccDNA, e.g., 40% of eccDNA in cancers are at least about 1 kilobase (kb) and can range in length from about 1 kb to about a few Megabases (MB). Any method of high throughput sequencing can be used for sequencing the tagged eccDNA fragments e.g. Illumina paired-end reads, Nanopore sequencing from Oxford Nanopore or PacBio SMRT sequencing. These sequencing techniques can be used to obtain the length of the eccDNA and also the presence of particular nucleic acid sequences on the eccDNA, such as the presence of resistance genes on the eccDNA, as described in more detail elsewhere herein.

[0155] In some embodiments, determining whether the tagged linearized fragment is derived from an eccDNA comprises detecting a junctional sequence in the tagged linearized fragment. Detecting a junctional sequence can be carried out by any convenient method as would be apparent to one of ordinary skill in the art upon a review of the instant disclosure. In some embodiments, detecting a junctional sequence comprises employing read pairs. See, e.g. FIG. 1C. In some embodiments, mapped-unmapped pairs of reads are used. In mapped-unmapped pairs of reads, one read maps uniquely to the genome, but the other end is unmappable to the genome because it does not exist in the native genome. The approach, as might be employed using an algorithm (representative embodiments provided in the EXAMPLES, see, e.g., Table 11), then examines whether the unmappable read can be mapped by splitting read into two, where the two parts of the split read map to the genome on the “opposite strand” as to the mapped read, and flanking the mapped read. Since the paired-read sequencing is typically performed on DNA fragments of a defined length (usually 300-400 base), it is also ensured that at least one of the parts of the split read is <400 bases from the mapped read. In some embodiments, an alternate method for finding the circles, the discordant paired end read approach, is applied. The paired-end read (NGS) gives sequences of both ends of each DNA fragments and the distance between paired reads in sample genome should be approximately equal to library insert size. When both reads of the pair can be mapped to the reference genome, but they are mapped to different chromosomes, different orientations, or their coordinates may not agree with the library insert size, those read-pairs called discordant read-pairs. Specifically, when read-pairs are mapped to different orientation on same chromosome, they suggest presence of tandem duplication or circular DNA. Paired-reads with such a feature are extracted from whole reads. Additionally, paired reads can be employed to detect or determine a genomic region of origin for the eccDNA and/or can also be used to detect or determine the presence of a cell type, population of cells, and/or tissue type in the subject, such as the presence of cancer. The eccDNA are derived from transcriptionally active parts of the genome, which differ between tissue lineages. Thus, the chromosomal areas from which the eccDNA are derived may identify the tissue that the eccDNA arises from. eccDNA are also often enriched in CpG islands. The methylation status of CpG islands on the eccDNA can also be identified by available methods. Since the methylation of specific CpG islands also differ between tissue lineages, this is another method by which the presently disclosed subject matter can identify the lineage from which the eccDNA was derived.

[0156] In some embodiments, the biological sample can be permeabilized to allow access for an enzyme, such as an insertional enzyme. The permeabilization can be performed in a way to minimally perturb the nuclei in the sample. In some instances, the sample can be permeabilized using a permeabilization agent. Examples of permeabilization agents include, but are not limited to, NP40, digitonin, tween, streptolysin, and cationic lipids. In other instances, the sample can be permeabilized using hypotonic shock and/or ultrasonication. In other cases, the insertional enzyme can be highly charged, which may allow it to permeabilize through cell membranes.

[0157] A “sample”, as used herein, refers in some embodiments to a biological sample from a subject, including, but not limited to, normal tissue samples, diseased tissue samples, biopsies (solid and liquid), blood, saliva, feces, semen, tears, cerebrospinal fluid, sputum, bronchial washes and urine. A sample can also be any other source of material obtained from a subject which contains cells, tissues, or fluid of interest. A sample can also be obtained from cell or tissue culture. In some embodiments, the sample comprises a biopsy or a blood sample. However, any suitable sample as would be apparent to one of ordinary skill in the art upon a review of the instant disclosure can be analyzed. The terms “sample” and “biological sample” are used interchangeably herein and in a broad sense, and are intended to include sources that contain nucleic acids. Exemplary biological samples include, but are not limited to tissues, including but not limited to, liver, spleen, kidney, lung, intestine, thymus, colon, tonsil, testis, skin, brain, heart, muscle and pancreas tissue. Other exemplary biological samples include, but are not limited to, biopsies, bone marrow samples, organ samples, skin fragments and organisms. Materials obtained from clinical or forensic settings are also within the intended meaning of the term biological sample. Preferably, the sample is derived from a human, animal or plant. Preferably, the biological sample is a tissue sample, preferably an organ tissue sample. Preferably, samples are human. The sample can be obtained, for example, from autopsy, biopsy or from surgery. It can be a solid tissue such as, for example, parenchyme, connective or fatty tissue, heart or skeletal muscle, smooth muscle, skin, brain, nerve, kidney, liver, spleen, breast, carcinoma (e.g., bowel, nasopharynx, breast, lung, stomach etc.), cartilage, lymphoma, meningioma, placenta, prostate, thymus, tonsil, umbilical cord or uterus. The tissue can be a tumor (benign or malignant), cancerous or precancerous tissue. The sample can be obtained from an animal or human subject affected by disease or disorder or suspected of same (normal or diseased), or considered normal or healthy. In some embodiments, the tumor (benign or malignant), cancerous, or precancerous tissue is a tissue from any of the tissues set forth herein above, such as but not limited to, pancreatic cancer, breast cancer, prostate cancer, ovarian cancer, lung cancer, head and neck cancer, non-Hodgkin’s lymphoma, acute myelogenous leukemia, acute lymphoblastic leukemia, neuroblastoma, gliomas, and glioblastoma.

[0158] If desired, fixation of the biological sample can be effected with fixatives known to the person skilled in the art. In one embodiment, the fixative, includes but is not limited to, acids, alcohols, ketones or other organic substances, such as, glutaraldehyde, formaldehyde or paraformaldehyde. Examples of fixatives and uses thereof may be found in Sambrook et al. (1989). If employed, the used fixation also preserves DNA and RNA. Other fixatives and fixation methods for providing a fixed biological sample are known in the prior art. For example, the biological sample can be fresh froze, wherein alcohol based fixed samples can be used. In one embodiment, the fixed tissue may or may not be embedded in a non-reactive substance such as paraffin. Embedding materials include, but are not limited to, paraffin, mineral oil, non- water soluble waxes, celloidin, polyethylene glycols, polyvinyl alcohol, agar, gelatin, nitrocelluloses, methacrylate resins, epoxy resins or other plastic media. Thereby, one can produce tissue sections of the biological material suitable for histological examinations.

[0159] In some embodiments, the sample is treated with an exonuclease prior to treating the biological sample to produce a tagged linearized fragment of genomic DNA. Any suitable exonuclease as would be apparent to one of ordinary skill in the art may be used. Representative exonucleases are disclosed in the EXAMPLES. By way of example and not limitation, any DNA exonuclease with no endonuclease activity can be used. Suitable examples are commercially available through the website, https://www.biocompare.com/Search-Enzymes/?search=DNA+exonuclease. By way of specific example and not limitation, Exonuclease I and Exonuclease III from E. coli and/or Lambda Exonuclease can be employed. Thus, in some embodiments, an exonuclease is first used to remove any linear genomic DNA that may be contaminating the genome-derived eccDNA preparation. Then, the eccDNA is linearized such as by using an insertional enzyme complex, such as a transposon, or by a restriction enzyme and then ligated to sequencing primers. The linearized, tagged eccDNA is then sequenced.

[0160] In some embodiments, the subject is a subject suffering from a cancer or suspected to be suffering from a cancer or a subject having a genetic disease or disorder or suspected to have a genetic disease or disorder. In some embodiments, the subject having a genetic disease or disorder or suspected to have a genetic disease or disorder is a fetus and the sample comprises a maternal blood sample. In some embodiments, identifying a cell type in the subject, identifying a cell population, identifying a tissue type; and/or identifying a nucleic acid sequence on the eccDNA further comprises identifying a cancer or a genetic disease or disorder in the subject. For example, fetal eccDNA present in the maternal blood can be used to identify fetal genetic disorders, such as Down’s syndrome.

[0161] In some embodiments, the method further comprises choosing a therapy based on the identified cell type, cell population, tissue type, and/or nucleic acid sequence. For example, a therapeutic agent, dose level, or modality can be selected based on the identified cell type, cell population, tissue type, and/or nucleic acid sequence, and then administered. Non-limiting representative embodiments are disclosed in the EXAMPLES set forth herein below. Additional examples would be apparent on of ordinary skill in the art upon a review of the instant disclosure, and include but are not limited to for example, avoiding a drug for therapy of a particular patient’s cancer because a gene that confers resistance to the drug is already present in the cancer on an eccDNA and will be rapidly amplified to make the cancer resistant to said drug.

[0162] A representative therapy that can be chosen and administered is the administration of an effective amount of a pharmaceutical composition to treat a disease or disorder in the subject. Pharmaceutical compositions administered to a subject in need thereof by any number of routes including, but not limited to, intra-tumoral, topical, oral, intravenous, intramuscular, intra-arterial, intramedullary, intrathecal, intraventricular, transdermal, subcutaneous, intraperitoneal, intranasal, enteral, topical, sublingual, or rectal approaches.

[0163] In accordance with one embodiment, a method for treating a subject in need of such treatment is provided. The method comprises administering a pharmaceutical composition to a subject in need thereof. Pharmaceutical compositions useful for practicing the presently disclosed subject matter may be administered to deliver a dose of between 1 ng/kg/day and 100 mg/kg/day.

[0164] The presently disclosed subject matter encompasses the preparation and use of pharmaceutical compositions comprising a compound useful for treatment of the diseases and disorders disclosed herein as an active ingredient. Such a pharmaceutical composition may consist of the active ingredient alone, in a form suitable for administration to a subject, or the pharmaceutical composition may comprise the active ingredient and one or more pharmaceutically acceptable carriers, one or more additional ingredients, or some combination of these. The active ingredient may be present in the pharmaceutical composition in the form of a physiologically acceptable ester or salt, such as in combination with a physiologically acceptable cation or anion, as is well known in the art.

[0165] As used herein, the term “physiologically acceptable” ester or salt means an ester or salt form of the active ingredient which is compatible with any other ingredients of the pharmaceutical composition, which is not deleterious to the subject to which the composition is to be administered.

[0166] The compositions of the presently disclosed subject matter may comprise at least one active polypeptide, one or more acceptable carriers, and optionally other polypeptides or therapeutic agents.

[0167] For in vivo applications, the compositions of the presently disclosed subject matter may comprise a pharmaceutically acceptable salt. Suitable acids which are capable of forming such salts with the compounds of the presently disclosed subject matter include inorganic acids such as hydrochloric acid, hydrobromic acid, perchloric acid, nitric acid, thiocyanic acid, sulfuric acid, phosphoric acid and the like; and organic acids such as formic acid, acetic acid, propionic acid, glycolic acid, lactic acid, anthranilic acid, cinnamic acid, naphthalene sulfonic acid, sulfanilic acid and the like.

[0168] Pharmaceutically acceptable carriers include physiologically tolerable or acceptable diluents, excipients, solvents, or adjuvants. The compositions are in some embodiments sterile and nonpyrogenic. Examples of suitable carriers include, but are not limited to, water, normal saline, dextrose, mannitol, lactose or other sugars, lecithin, albumin, sodium glutamate, cysteine hydrochloride, ethanol, polyols (propylene glycol, polyethylene glycol, glycerol, and the like), vegetable oils (such as olive oil), injectable organic esters such as ethyl oleate, ethoxylated isosteraryl alcohols, polyoxyethylene sorbitol and sorbitan esters, microcrystalline cellulose, aluminum methahydroxide, bentonite, kaolin, agar-agar and tragacanth, or mixtures of these substances, and the like.

[0169] The pharmaceutical compositions may also contain minor amounts of nontoxic auxiliary pharmaceutical substances or excipients and/or additives, such as wetting agents, emulsifying agents, pH buffering agents, antibacterial and antifungal agents (such as parabens, chlorobutanol, phenol, sorbic acid, and the like). Suitable additives include, but are not limited to, physiologically biocompatible buffers (e.g., tromethamine hydrochloride), additions (e.g., 0.01 to 10 mole percent) of chelants (such as, for example, DTPA or DTPA-bisamide) or calcium chelate complexes (as for example calcium DTPA or CaNaDTPA-bisamide), or, optionally, additions (e.g., 1 to 50 mole percent) of calcium or sodium salts (for example, calcium chloride, calcium ascorbate, calcium gluconate or calcium lactate). If desired, absorption enhancing or delaying agents (such as liposomes, aluminum monostearate, or gelatin) may be used. The compositions can be prepared in conventional forms, either as liquid solutions or suspensions, solid forms suitable for solution or suspension in liquid prior to injection, or as emulsions. Pharmaceutical compositions according to the presently disclosed subject matter can be prepared in a manner fully within the skill of the art.

[0170] Where the administration of the composition is by injection or direct application, the injection or direct application may be in a single dose or in multiple doses. Where the administration of the compound is by infusion, the infusion may be a single sustained dose over a prolonged period of time or multiple infusions.

[0171] The formulations of the pharmaceutical compositions described herein may be prepared by any method known or hereafter developed in the art of pharmacology. In general, such preparatory methods include the step of bringing the active ingredient into association with a carrier or one or more other accessory ingredients, and then, if necessary or desirable, shaping or packaging the product into a desired single- or multidose unit.

[0172] A pharmaceutical composition of the presently disclosed subject matter may be prepared, packaged, or sold in bulk, as a single unit dose, or as a plurality of single unit doses. As used herein, a “unit dose” is a discrete amount of the pharmaceutical composition comprising a predetermined amount of the active ingredient. The amount of the active ingredient is generally equal to the dosage of the active ingredient which would be administered to a subject or a convenient fraction of such a dosage such as, for example, one-half or one-third of such a dosage.

[0173] The relative amounts of the active ingredient, the pharmaceutically acceptable carrier, and any additional ingredients in a pharmaceutical composition of the presently disclosed subject matter will vary, depending upon the identity, size, and condition of the subject treated and further depending upon the route by which the composition is to be administered. By way of example, the composition may comprise between 0.1% and 100% (w/w) active ingredient.

[0174] In addition to the active ingredient, a pharmaceutical composition of the presently disclosed subject matter may further comprise one or more additional pharmaceutically active agents. Controlled- or sustained-release formulations of a pharmaceutical composition of the presently disclosed subject matter may be made using conventional technology. As used herein, “additional ingredients” include, but are not limited to, one or more of the following: excipients; surface active agents; dispersing agents; inert diluents; granulating and disintegrating agents; binding agents; lubricating agents; sweetening agents; flavoring agents; coloring agents; preservatives; physiologically degradable compositions such as gelatin; aqueous vehicles and solvents; oily vehicles and solvents; suspending agents; dispersing or wetting agents; emulsifying agents, demulcents; buffers; salts; thickening agents; fillers; emulsifying agents; antioxidants; antibiotics; antifungal agents; stabilizing agents; and pharmaceutically acceptable polymeric or hydrophobic materials. Other “additional ingredients” which may be included in the pharmaceutical compositions of the presently disclosed subject matter are known in the art and described, for example in Gennaro (1990) Remington’s Pharmaceutical Sciences, 18th ed., Mack Pub. Co., Easton, Pennsylvania, United States of America and/or Gennaro (ed.) (2003) Remington: The Science and Practice of Pharmacy, 20th edition Lippincott, Williams & Wilkins, Philadelphia, Pennsylvania, United States of America, each of which is incorporated herein by reference.

[0175] Typically, dosages of the compound of the presently disclosed subject matter which may be administered to an animal, in some embodiments a human, range in amount from 1 µg to about 100 g per kilogram of body weight of the animal. While the precise dosage administered will vary depending upon any number of factors, including but not limited to, the type of animal and type of disease state being treated, the age of the animal and the route of administration. In some embodiments, the dosage of the compound will vary from about 1 mg to about 10 g per kilogram of body weight of the animal. In another aspect, the dosage will vary from about 10 mg to about 1 g per kilogram of body weight of the animal.

[0176] The compositions may be administered to an animal as frequently as several times daily, or it may be administered less frequently, such as once a day, once a week, once every two weeks, once a month, or even less frequently, such as once every several months or even once a year or less. The frequency of the dose will be readily apparent to the skilled artisan and will depend upon any number of factors, such as, but not limited to, the type of cancer being diagnosed, the type and severity of the condition or disease being treated, the type and age of the animal, etc.

[0177] Suitable preparations include injectables, either as liquid solutions or suspensions, however, solid forms suitable for solution in, suspension in, liquid prior to injection, may also be prepared. The preparation may also be emulsified, or the compositions encapsulated in liposomes. The active ingredients are often mixed with excipients which are pharmaceutically acceptable and compatible with the active ingredient. Suitable excipients are, for example, water saline, dextrose, glycerol, ethanol, or the like and combinations thereof. In addition, if desired, the preparation may also include minor amounts of auxiliary substances such as wetting or emulsifying agents, pH buffering agents, and/or adjuvants.

[0178] The formulations of the pharmaceutical compositions described herein may be prepared by any method known or hereafter developed in the art of pharmacology. In general, such preparatory methods include the step of bringing the active ingredient into association with a carrier or one or more other accessory ingredients, and then, if necessary or desirable, shaping or packaging the product into a desired single- or multidose unit.

[0179] Compositions may be administered to, for example, a cell, a tissue, or a subject by any of several methods described herein and by others which are known to those of skill in the art.

[0180] The relative amounts of the active ingredient, the pharmaceutically acceptable carrier, and any additional ingredients in a pharmaceutical composition of the presently disclosed subject matter will vary, depending upon the identity, sex, age, size, and condition of the subject treated and further depending upon the route by which the composition is to be administered.

[0181] Other components such as preservatives, antioxidants, surfactants, absorption enhancers, viscosity enhancers or film forming polymers, bulking agents, diluents, coloring agents, flavoring agents, pH modifiers, sweeteners or taste-masking agents may also be incorporated into the composition. Suitable coloring agents include red, black, and yellow iron oxides and FD&C dyes such as FD&C Blue No. 2, FD&C Red No. 40, and the like. Suitable flavoring agents include mint, raspberry, licorice, orange, lemon, grapefruit, caramel, vanilla, cherry grape flavors, combinations thereof, and the like. Suitable pH modifiers include citric acid, tartaric acid, phosphoric acid, hydrochloric acid, maleic acid, sodium hydroxide, and the like. Suitable sweeteners include aspartame, acesulfame K, thaumatic, and the like. Suitable taste-masking agents include sodium bicarbonate, ionexchange resins, cyclodextrin inclusion compounds, adsorbates, and the like.

[0182] The formulations of the pharmaceutical compositions described herein may be prepared by any method known or hereafter developed in the art of pharmacology. In general, such preparatory methods include the step of bringing the active ingredient into association with a carrier or one or more other accessory ingredients, and then, if necessary or desirable, shaping or packaging the product into a desired single- or multidose unit.

[0183] Although the descriptions of pharmaceutical compositions provided herein are principally directed to pharmaceutical compositions which are suitable for ethical administration to humans, it will be understood by the skilled artisan that such compositions are generally suitable for administration to animals of all sorts. Modification of pharmaceutical compositions suitable for administration to humans in order to render the compositions suitable for administration to various animals is well understood, and the ordinarily skilled veterinary pharmacologist can design and perform such modification with merely ordinary, if any, experimentation. Subjects to which administration of the pharmaceutical compositions of the presently disclosed subject matter is contemplated include, but are not limited to, humans and other primates, mammals including commercially relevant mammals such as cattle, pigs, horses, sheep, cats, and dogs, and birds including commercially relevant birds such as chickens, ducks, geese, and turkeys.

[0184] In some embodiments, the presently disclosed subject matter provides a kit for detecting eccDNA. In some embodiments, the kit comprises one or more reagents suitable for carrying out a method in accordance with the presently disclosed subject matter, and instruction material for employing the one or more reagents.

[0185] As used herein, an “instructional material” includes a publication, a recording, a diagram, or any other medium of expression which can be used to communicate the usefulness of the methods of the presently disclosed subject matter in the kit for effecting the analyses recited herein. Optionally, or alternately, the instructional material may describe one or more methods of using the compositions for diagnostic or identification purposes or of alleviation the diseases or disorders in a cell or a tissue of a mammal. The instructional material of the kit of the presently disclosed subject matter may, for example, be affixed to a container which contains one or more reagents for carrying out the presently disclosed subject matter or be shipped together with a container which contains the one or reagents. Alternatively, the instructional material may be shipped separately from the container with the intention that the instructional material and the reagents be used cooperatively by the recipient.

[0186] In accordance with the presently disclosed subject matter, as described above or as discussed in the EXAMPLES below, there can be employed conventional chemical, cellular, histochemical, biochemical, molecular biology, microbiology, recombinant DNA, and clinical techniques which are known to those of skill in the art. Such techniques are explained fully in the literature. See for example, Sambrook et al., 1989; Glover, 1985; Gait, 1984; Harlow & Lane, 1988; Roe et al., 1996; and Ausubel et al., 1995.

[0187] The presently disclosed subject matter may be embodied in other specific forms without departing from the spirit or essential attributes thereof. The presently disclosed subject matter encompasses all combinations of the different aspects of the presently disclosed subject matter noted herein. It is understood that any and all embodiments of the presently disclosed subject matter may be taken in conjunction with any other embodiment or embodiments to describe additional representative embodiments. It is also to be understood that each individual element of the disclosed embodiments is intended to be taken individually as its own independent representative embodiment. Furthermore, any element of an embodiment is meant to be combined with any and all other elements from any embodiment to describe an additional embodiment.

### EXAMPLES

[0188] The presently disclosed subject matter will be now be described more fully hereinafter with reference to the accompanying EXAMPLES, in which representative embodiments of the presently disclosed subject matter are shown. The presently disclosed subject matter can, however, be embodied in different forms and should not be construed as limited to the embodiments set forth herein. Rather, these embodiments are provided so that this disclosure will be thorough and complete, and will fully convey the scope of the presently disclosed subject matter to those skilled in the art.

### Example 1

### Principle of Circular DNA Identification by Tagmentation Method

[0189] EccDNAs are known to have chromosomal origin. A linear DNA fragment is generated either by the chromosome breakage due to adjoining DNA breaks, e.g. in chromothripsis (Maher et al., Cell 148, 29-32 (2012)), or by DNA synthesis related to DNA replication or repair. The two ends of a linear DNA are ligated to make a circular DNA (FIG. 1A), creating a specific junctional sequence that is not present in the normal reference genome. A very simple method is provided to identify eccDNAs by collecting all the read pairs where one read of a pair maps uniquely to the genome in a contiguous manner (<=5 bp insertions or deletions or substitutions) and the other read maps as a split read (non-contiguous segments that could be as far apart as a few MB, but usually are much closer) flanking the mapped read (FIG. 1B). The split read maps to the circular DNA ligation junction and the other (contiguously mapped read) maps to the body of the putative eccDNA. The start of the first split read and the end of second read are annotated as the start and end of the eccDNA. Tandem duplication of DNA in the genome will also create a similar junctional sequence, but for the purpose of identifying incipient gene amplification, an eccDNA or a tandem duplication of a chromosomal segment are equally important. However, if the aim is to exclusively and comprehensively identify eccDNA, the ATAC-seq library is prepared from eccDNA-enriched samples where linear DNA has been removed by exonuclease digestion, as also described elsewhere herein.

[0190] A representative technique or pipeline to identify eccDNA coming from one locus (non chimeric eccDNA) of any length is available through the following GitHub page (https://github.com/pk7zuva/Circle_finder (https://github.com/pk7zuva/Circle_finder/blob/master/circle_finder-pipeline-bwa-mem-samblaster.sh). The steps to find a circular DNA from any paired end high throughput-sequencing library are detailed in FIGS. 1B-1C and the Methods for the EXAMPLES provided herein below. A scrip for an algorithm is also provided herein below at Table 11

### Example 2

### Application of ATAC-Seq to Identify Circular DNA in OVCAR8 and C4-2B Cell Lines

[0191] ATAC-seq libraries were prepared from C4-2B prostate cancer and OVCAR8 ovarian cancer cell lines. The sequencing and mapping statistics are given in Table 4; >90% of the reads mapped to human genome and the computational pipeline identified hundreds of circular DNA. The length distribution of eccDNA is shown in FIG. 2: around 68% in C4-2B and 37% in OVCAR8 of eccDNA are <1 kb, and so are similar to the microDNAs that were identified earlier in normal and cancer cells (4, 5). However, 32% of the eccDNA in C4-2 and 63% in OVCAR8 are >1 kb, including eccDNAs long enough to encode gene segments or even complete genes. The eccDNA are derived from all the chromosomes (Tables 7A and 7B). As a positive control hundreds of junctional sequences from the circular mitochondrial genome contaminating the nuclear preparations were identified.

### Example 3

### Validation of eccDNA Identified in C4-2 and OVCAR8 Cells by Inverse PCR

[0192] To confirm that the identified junctions are genuinely from eccDNA, and not from tandem genome duplications, circular DNA were isolated by a previously described method that relies on column chromatography and exonuclease digestion to remove all linear DNA and enrich eccDNA (FIG. 3A (5); see Methods for more details). Inverse PCR was performed with primers designed to amplify across the junctions of eccDNAs from C4-2B & OVCAR8 cell lines (FIG. 3B). 11 eccDNAs from OVCAR8 and 6 from C4-2B were tested. 9 of the 11 targets from OVCAR8 and 2 of the 6 from C4-2B gave amplicons of expected sizes (FIGS. 3B-3C). Sanger sequencing of the amplicons confirmed the junctional sequences identified by ATAC-seq (FIG. 3D and Table 2 immediately below). A fraction of the primers (2 in OVCAR8 and 4 in C4-2B) did not give desired amplicons possibly because of their presence in low complexity regions or because they came from tandem linear chromosomal duplications which did not survive column chromatography and exonuclease digestion. The junctional sequences in FIG. 3D and repeated below are unique to the eccDNA. The two halves of the junctional sequence are present in the genome, but they are separate from each other. Numbers indicate chromosomal location on respective chromosomes C1-C11, full sequences provided in the Sequence Listing as follows: C1, SEQ ID NO: 12; C2, SEQ ID NO: 13; C3, SEQ ID NO: 14; C4, SEQ ID NO: 15; C5, SEQ ID NO: 16; C6, SEQ ID NO: 17; C7, SEQ ID NO: 18; C8, SEQ ID NO: 19; C9, SEQ ID NO: 20; C10, SEQ ID NO: 21; C11, SEQ ID NO: 22.

Table 2

Junctional sequences - FIG. 3D
2781702791238136072
C1: CAACCAGCAGCCTGC | TGGGTCAAAACCACC (SEQ ID NO: 1)
41645951141641805
C2: TTTTTAGTAGAGACG | GGAAAGAAATCATCC (SEQ ID NO: 2)
96046281196049856
C3: TCCCCGGCTATGAAC | CACTAAACTCCCAAG* (SEQ ID NO: 3)
1329312701132926653
C4: TCTCATTATGCACTT | ATTTTACAAGCCCTG (SEQ ID NO: 4)
124475742 | 124513871
C5: CTGCCTCCCAGGGGC | AGCCAGCAGCCCTCT* (SEQ ID NO: 5)
734932290 | 73902830
C6: TTTCTCCCTGGAATT | GAGAGTTGAGAATAGCT* (SEQ ID NO: 6)
103457332 | 103528083
C7: CCGACTGAACTCTAC | GTGCCTGGCCTAATT* (SEQ ID NO: 7)
169116581 | 169109073
C8:GGGGCCTGGCGCACT | AGACTCGCCTGTCAC (SEQ ID NO: 8)
54059860154063911
C9: AGTTTAGCCAGTATA | CTAAGCCGTAAGTGT* (SEQ ID NO: 9)
70900094 | 70855001
C10: TTTCAGCCAAGCAACICAATATTGCTGTGTC (SEQID NO: 10)
75212513175206880
C11: GCATTGACTAAGACG | CCATCTCCTGAGCTC (SEQ ID NO: 11)

### Example 4

### Validation of eccDNA by Metaphase Fish in OVCAR8 Cells

[0193] An independent method for ascertaining whether a locus identified in this study is in an extrachromsomal DNA is to carry out FISH on metaphase spreads. This analysis was performed with two loci that were predicted to be present as either an eccDNA or a gene duplication in OVCAR8 cells but not in C4-2 cells: chr2: 238136071-238170279 and chr10: 103457331-103528085. Both were confirmed by inverse PCR in FIG. 3 (C1 and C7). Signal was detected off the main chromosomes in some of the metaphase spreads, but not others (FIG. 4A), consistent with the hypothesis that the junctional sequences identify somatically mosaic eccDNA in this cell line. For negative control C4-2 (FIG. 4B), the spreads do not show an extrachromosomal DNA signal. The 71 kb eccDNA in OVCAR8 (n = 28) and C4-2 (n = 24) (negative control) metaphase spreads were quantified for locus chr10: 103457331-103528085 and shown in the graph (FIG. 4C).

### Example 5

### Identification of eccDNA from ATAC-seq Data for Glioblastoma (GBM) Cell Lines

[0194] Epidermal growth factor receptor (EGFR) was one of the first oncogenes identified in brain cancer and is massively amplified in some GBM patients (Libermann et al., Nature 313, 144-147 (1985)). This somatic copy number variation is present in 43% of GBM patients (Maire et al., Neuro Oncol 16 Suppl 8, viii1-6 (2014)) . Recent studies have provided further evidence that this oncogenic amplification occurs on eccDNA (deCarvalho et al., Nat Genet 50, 708-717 (2018); Turner et al., Nature 543, 122-125 (2017); Xu et al., Acta Neuropathol 137, 123-137 (2019)) . To check if the eccDNA can be detected in ATAC-seq data generated from GBM cell lines, six ATAC-seq libraries generated from GBM cell lines developed from a single glioblastoma patient (Xie et al., Cell 175, 1228-1243 e1220 (2018)) were assessed. The Circle_finder pipeline was run, combining all the six libraries (GSM3318539, GSM3318540, GSM3318541, GSM3318542, GSM3318543 and GSM3318544) and 58 eccDNAs were found, varying in size from few hundred bases to few megabases. The length distribution and chromosomal distribution of identified eccDNAs are shown in FIG. 6 and Table 9. Of note, eccDNA harboring the EGFR gene was the most abundant eccDNA. The top five most-abundant eccDNAs (or tandem gene duplications) identified were chr4:118591708-119454712 (METTL14, SEC24D, SYNPO2, MYOZ2, USP53, C4orf3, FABP2), chr7:54590796-55256528 (SEC61G, EGFR), chr7:54771165-54782815(No protein coding genes), chr7:65038261-65873269 (transcribed unprocessed pseudogenes), chr7:65038264-65873256 (transcribed unprocessed pseudogenes).

### Example 6

### Application to GBM and LGG TCGA ATAC-Seq Data

[0195] Having demonstrated above that ATAC-seq data can be repurposed to identify eccDNA, attention was turned to ATAC-seq data generated by TCGA consortium (Corces et al., Science 362, Issue 6413, eaav1898 (2018)) with a primary focus on two LGGs for which whole genome sequencing data and ATAC-seq data was available. In the TCGA-DU-5870-02A ATAC-seq library 21 eccDNAs (junctional tag >=2; 13>1 kb, 7>50 kb) were found. In the TCGA-DU-5870-02A WGS library 637 eccDNAs (junctional tag >=2; 361>1 kb, 105>50 kb) were found. The eccDNAs identified in ATAC-seq and WGS libraries were further compared and 21 common eccDNAs (junctional tag>=1; Table 5) were found.

[0196] In the ATAC-seq library from TCGA-DU-6407-02B 64 eccDNAs (junctional tag >=2; 21>1 kb, 15>50 kb) were found and in WGS libraries from the same tumor 455 eccDNAs (junctional tag >=2; 307>1 kb, 131>50 kb) were found. 44 common eccDNAs were identified in both libraries (junctional tag>=1; Table 6). Many of common eccDNAs had a high number of junctional tags in the WGS library, perhaps a surrogate marker of their abundance.

[0197] A higher number of eccDNA/duplication events was seen in WGS compared to ATAC-seq, but 21 and 44 eccDNAs were common between ATAC-seq and WGS in TCGA-DU-5870-02A and TCGA-DU-6407-02B libraries respectively (Tables 5-6). The lack of more overlap between the eccDNAs identified by ATAC-seq and WGS from even the same tumor is most likely due to somatic mosaicism (a) because different sections are used for the two libraries and (b) because of insufficient depth of sequencing in either library.

[0198] As mentioned earlier, the Circle_finder algorithm cannot distinguish between an extrachromosomal circle and chromosomal segmental tandem duplication without experimentally purifying the circles before library preparation, and so these loci are referred to as eccDNA/duplication. The signal for the eccDNA/duplication detected from WGS data was strong in the two tumors and was also evident in a targeted Copy Number Analysis from the WGS data (not a genome-wide analysis). The median sequencing read coverage at the eccDNA/duplication loci was 1.5 fold higher compared to equivalent upstream or downstream regions, suggesting that at least a two-fold amplification of one allele occurred in at least 50% of the cells. Surprisingly, the eccDNA/duplication events detected by ATAC-seq did NOT show corresponding amplification in WGS (FIG. 4D). This result suggests that as with eccDNAs detected by rolling circle amplification, the eccDNA/duplication events identified by ATAC-seq are somatically mosaic in the GBM cell lines and are detected even before a CNV is apparent from whole genome sequencing of a large population of tumor cells.

[0199] 10 LGG and 8 GBM ATAC-seq libraries were next analyzed and a total of 2152 and 3147 eccDNA/duplication events were found in LGG and GBM samples, respectively. The length distribution of eccDNA/duplications is shown in FIG. 4E. 58% of the loci are <1 kb (similar to microDNA), but nearly 41% (2200 eccDNAs in GBM+LGG) are 50 kb to 50 MB in length, suggesting that they harbor full length genes. The chromosomal distribution of eccDNA identified (Junctional Tags>=2) in LGG and GBM samples is shown in Tables 8A and 8B. The EGFR locus was contained in the eccDNA/duplication identified in GBM patients, supporting that the use of Circle_finder in ATAC-seq data can identify loci that have been amplified even in a subset of the cells in the tumor.

### Example 7

### Cumulative Analysis of All Small eccDNA (microDNA)

[0200] After pooling all the eccDNA identified so far in Examples 1-6 (OVCAR8 + C4-2 + 8 GBM + 10 LGG), the ones <1 kb were analyzed to compare their properties with the microDNA identified earlier by rolling circle amplification (Kumar et al., Mol Cancer Res 15, 1197-1205 (2017); Shibata et al., Science 336, 82-86 (2012)). 4073 eccDNA were found that were <1 kb. The length distribution of these circles reveals characteristic peaks at about 200 and about 400 bases (FIG. 5A), that have been noted earlier. The higher GC content relative to the genome average (FIG. 5B), and the enrichment of the microDNA from upstream of genes, 5ʹUTR and CpG islands (FIG. 5C) is also similar to previous reports. Finally, around 15% of the small eccDNAs reported here appear to have used flanking sequences of 2-15 base micro homology (FIG. 5D) to promote the ligation that gives rise to the circle.

### Example 8

### Pan Cancer Analysis of eccDNA in TCGA ATAC-Seq Data

[0201] Finally, 360 ATAC-seq libraries from twenty-three tumor types generated by TCGA consortium were analyzed (FIG. 6 and Table 9, and FIG. 7; Tables 4-6) (Corces et al., Science 362, Issue 6413, eaav1898 (2018)). A total of 18,143 eccDNAs/duplications were found, of which 86% were <1 kb. The co-ordinates of eccDNA identified in each library are available through the webpage (http://genome.bioch.virginia.edu/TCGA-ATACSEQ-ECCDNA. The unique eccDNA intervals were used to extract the full length genes harbored inside the circle. The cancer driver genes (Bailey et al., Cell 174, 1034-1035 (2018)) amplified as eccDNA/duplication in individual tumor type is given in Table 3. Gene ontology analysis of all the genes carried on the eccDNA/duplication loci shows that Pathways related to nucleosomal events are significantly enriched in these loci (FIG. 5E).

TABLE 3

Known Cancer Driver Genes Amplified in eccDNA/Gene Duplications (JTGE1) in Various Tumor Types

| | |
|---|---|
| ACC | FGFR2, H3F3A, FOXA1, SMARCA4, NFE2L2, PMS1, SF3B1, SOS1, PCBP1, KIT, EGFR, GNAQ |
| BLCA | ERCC2, GRIN2D, PPP2R1A, SOS1, PCBP1, MSH3 |
| BRCA | FGFR2, MTOR, WT1, SF1, CCND1, PTPRC, PTPN11, KRAS, H3F3A, ERBB3, KLF5, MACF1, AKT1, FOXA1, MAP2K1, IDH2, ERBB2, SPOP, SETBP1, SMARCA4, CACNA1A, PIK3R2, GNA11, ERCC2, GRIN2D, PPP2R1A, U2AF1, NFE2L2, PMS1, SF3B1, IDH1, MAPK1, SOS1, PCBP1, CTNNB1, RHOA, FBXW7, KIT, MSH3, PIK3CG, UNCX, BRAF, CUL1, EGFR, GTF2I, MYC, SOX17, GNAQ, EIF1AX |
| CESE | MTOR, PTPRC, H3F3A, NFE2L2, PMS1, GNAQ |
| COAD | FGFR2, MTOR, WT1, SF1, CCND1, PTPRC, KRAS, H3F3A, ERBB3, CDK4, CHD4, ARID1A, KLF5, MACF1, FOXA1, MAP2K1, IDH2, ERBB2, SPOP, SETBP1, SMARCA4, CACNA1A, PIK3R2, GNA11, ERCC2, GRIN2D, PPP2R1A, GNAS, U2AF1, NFE2L2, PMS1, SF3B1, IDH1, MAPK1, PLXNB2, SOS1, PCBP1, PIK3CA, CTNNB1, RHOA, MSH3, EEF1A1, PIK3CG, BRAF, CUL1, EGFR, GTF2I, SOX17, GNAQ, EIF 1AX |
| ESCA | FGFR2, CCND1, PTPN11, KRAS, ERBB3, CDK4, KLF5, FOXA1, MAP2K1, IDH2, ERBB2, SETBP1, NFE2L2, PMS1, SF3B1, IDH1, SOS1, PCBP1, PIK3CA, CTNNB1, RHOA, KIT, MSH3, EEF1A1, EGFR, GTF2I, MYC, SOX17 |
| GBM | H3F3A, CDK4, PIK3R2, ERCC2, GRIN2D, EGFR, MYC |
| HNSC | FGFR2, MTOR, SF1, CCND1, PTPRC, KRAS, ERBB3, CDK4, KLF5, MAP2K1, ERBB2, SPOP, SETBP1, KEAP1, SMARCA4, CACNA1A, PIK3R2, ERCC2, GRIN2D, NFE2L2, PMS1, SF3B1, IDH1, PCBP1, PIK3CA, EGFR, GTF2I, MYC, GNAQ |
| KIRC | FGFR2, MTOR, WT1, PTPRC, KRAS, ERBB3, CDK4, FOXA1, MAP2K1, ERBB2, SPOP, SMARCA4, CACNA1A, PIK3R2, ERCC2, GRIN2D, PPP2R1A, NFE2L2, PMS1, SF3B1, IDH1, MAPK1, SOS1, PCBP1, PIK3CG, RAC1, SOX17 |
| KIRP | FGFR2, PTPRC, FOXA1, IDH2, ERBB2, SPOP, SMARCA4, ERCC2, GRIN2D, PPP2R1A, MAPK1, SMARCB1, PCBP1, PIK3CA, MSH3, PIK3CG, MET, BRAF, CUL1, EGFR, MYC, SOX17, GNAQ |
| LGG | WT1, MACF1, PCBP1, KIT, PIK3CG, MTOR |
| LIHC | WT1, SF1, CCND1, DHX9, PTPRC, PTPN11, KRAS, CHD4, MACF1, MAP2K1, ERBB2, SPOP, SETBP1, SMARCA4, CACNA1A, PIK3R2, GNA11, ERCC2, GRIN2D, U2AF1, PMS1, SF3B1, IDH1, SOS1, XPO1, PCBP1, PIK3CA, KIT, CDKN1A, EEF1A1, PIK3CG, BRAF, CUL1, GNAQ, EIF1AX |
| LUAD | FGFR2, MTOR, WT1, SF1, CCND1, PTPRC, KRAS, H3F3A, ERBB3, CDK4, KLF5, MACF1, MAP2K1, ERBB2, SPOP, SETBP1, SMARCA4, CACNA1A, PIK3R2, GNA11, ERCC2, GRIN2D, PPP2R1A, NFE2L2, PMS1, SF3B1, IDH1, SOS1, PCBP1, CTNNB1, RHOA, MSH3, EEF1A1, RAC1, GTF2I, MYC |
| LUSC | NRAS, PTPN11, KRAS, H3F3A, ERBB3, CDK4, ERCC2, GRIN2D, PPP2R1A, U2AF1, SF3B1, IDH1, SOS1, PCBP1, FGFR3, MSH3, GNAQ |
| MESO | FGFR2, PTPRC, PTPN11, ERCC2, GRIN2D, PPP2R1A, IDH1, CTNNB1, RHOA, PIK3CG, RAC1, GTF2I, MYC |
| PCPG | MTOR, NRAS, PTPRC, PMS1, SF3B1, IDH1, SOS1, EPAS1, PIK3CG, EGFR, MYC, SOX17 |
| PRAD | MTOR, KRAS, ERBB3, CDK4, CHD4, KLF5, FOXA1, ERBB2, SPOP, TP53, SETBP1, SMARCA4, CACNA1A, PIK3R2, GNA11, ERCC2, GRIN2D, PPP2R1A, NFE2L2, PMS1, SF3B1, IDH1, SOS1, PCBP1, KIT, MSH3, PIK3CG, EGFR, GTF2I, MYC, SOX17 |
| SKCM | CCND1, KRAS, CHD4, FOXA1, SETBP1, SMARCA4, CACNA1A, PIK3R2, ERCC2, GRIN2D, PPP2R1A, MAPK1, CTNNB1, RHOA, EGFR, EIF1AX |
| STAD | MTOR, NRAS, WT1, SF1, CCND1, KRAS, H3F3A, ERBB3, CDK4, MAP2K1, ERBB2, SPOP, SETBP1, SMAD4, SMARCA4, CACNA1A, PIK3R2, GRIN2D, NFE2L2, PMS1, SF3B1, IDH1, SOS1, PCBP1, PIK3CA, CTNNB1, RHOA, MSH3, CUL1, EGFR, GTF2I, MYC, SOX17, CNBD1, GNAQ, FAM46D |
| TGCT | WT1, KRAS, CHD4, MACF1, MAP2K1, IDH2, SETBP 1, ERCC2, GRIN2D, PPP2R1A, SOS1, CTNNB1, SOX17, EIF1AX |
| THCA | NRAS, KLF5, ERBB2, SPOP, ERCC2, GRIN2D, PPP2R1A, PCBP1, CTNNB1, RHOA, PIK3CG, GTF2I |
| UCEC | CCND1, KLF5, ERBB2, SPOP, PIK3R2, U2AF1, PCBP1, PIK3CA, PIK3CG |

TABLE 4

Summary of eccDNA Sequencing and Mapping to the Human Genome in C4-2 and OVCAR8 Cell Lines

| | C4-2 | OVCAR8 |
|---|---|---|
| Total PE150 reads | 374,931,197 | 346,833,854 |
| Mapped in pairs | 372,561,742 | 345,127,010 |
| Mapped-Reads | 373,585,003 | 343,541,464 |
| Un-Mapped-Reads | 1346194 | 1,706,844 |
| #eccDNA | 1,335 | 611 |

TABLE 5

Common eccDNA between WGS & ATACseq Libraries in TCGA-DU-5870-02A

| | JT-ATAC | JT-WGS | Length |
|---|---|---|---|
| chr12:8208854-8238302 | 1 | 13 | 29448 |
| chr13:42373132-42373518 | 1 | 12 | 386 |
| chr14:56200142-56200312 | 2 | 4 | 170 |
| chr14:99811139-99811333 | 2 | 1 | 194 |
| chr15:52523965-52524853 | 1 | 16 | 888 |
| chr1:60822423-60822666 | 1 | 7 | 243 |
| chr16:69820782-69825118 | 3 | 15 | 4336 |
| chr17:80024303-80024653 | 1 | 11 | 350 |
| chr18:79200703-79200779 | 1 | 2 | 76 |
| chr19:17722272-17722449 | 1 | 3 | 177 |
| chr2:110101070-110104430 | 1 | 14 | 3360 |
| chr22:49226585-49228448 | 2 | 11 | 1863 |
| chr3:42898790-46004380 | 1 | 1 | 3105590 |
| chr4:150242941-150244988 | 7 | 15 | 2047 |
| chr4:156660547-156660686 | 1 | 1 | 139 |
| chr6:167516501-167516632 | 1 | 1 | 131 |
| chr6:54059859-54063911 | 2 | 19 | 4052 |
| chr7:24028695-24028902 | 1 | 3 | 207 |
| chr7:47669120-47669934 | 1 | 10 | 814 |
| chr7:65038315-65873352 | 3 | 3 | 835037 |
| chr9:14692642-14692781 | 1 | 1 | 139 |

TABLE 6

Common eccDNA between WGS & ATACseq Libraries in TCGA-DU-5870-02A

| | JT-ATAC | JT-WGS | Length |
|---|---|---|---|
| chr10:95447028-95448268 | 1 | 7 | 1240 |
| chr11:28824878-36215494 | 1 | 16 | 7390616 |
| chr11:29133708-29430833 | 1 | 4 | 297125 |
| chr11:31877072-36188811 | 3 | 13 | 4311739 |
| chr11:36202059-36238115 | 2 | 28 | 36056 |
| chr11:36214300-36237662 | 1 | 9 | 23362 |
| chr11:36412110-36417948 | 2 | 13 | 5838 |
| chr11:36412110-36417951 | 2 | 13 | 5841 |
| chr1:14109813-14112070 | 1 | 1 | 2257 |
| chr13:113232110-113232386 | 1 | 1 | 276 |
| chr13:35957905-35958285 | 1 | 3 | 380 |
| chr13:42373132-42373518 | 1 | 15 | 386 |
| chr13:76789088-76789267 | 1 | 1 | 179 |
| chr14:100526783-100526942 | 1 | 1 | 159 |
| chr1:56530360-56530674 | 1 | 2 | 314 |
| chr15:91440230-91446387 | 1 | 13 | 6157 |
| chr17:41632757-41633279 | 1 | 1 | 522 |
| chr17:80024303-80024653 | 1 | 1 | 350 |
| chr20:2236337-2236458 | 2 | 19 | 121 |
| chr2:11554-91086 | 1 | 10 | 79532 |
| chr2:16052063-16452027 | 1 | 9 | 399964 |
| chr2:16177696-17516120 | 6 | 157 | 1338424 |
| chr2:16225124-16226720 | 8 | 195 | 1596 |
| chr2:16567034-17412029 | 1 | 1 | 844995 |
| chr2:16632426-17084537 | 1 | 13 | 452111 |
| chr2:16741536-17706105 | 2 | 56 | 964569 |
| chr2:17279980-17334701 | 7 | 15 | 54721 |
| chr2:17296668-17297551 | 3 | 14 | 883 |
| chr2:17584356-17877776 | 2 | 18 | 293420 |
| chr22:27805472-27805771 | 3 | 2 | 299 |
| chr2:63459820-63461139 | 1 | 6 | 1319 |
| chr3:5565190-5565271 | 1 | 1 | 81 |
| chr3 :95749272-95752156 | 1 | 9 | 2884 |
| chr4:52081945-52082092 | 1 | 1 | 147 |
| chr5: 168031041-168034576 | 3 | 5 | 3535 |
| chr6:118690555-118692765 | 1 | 6 | 2210 |
| chr6:118940825-118941155 | 1 | 19 | 330 |
| chr6:54059859-54063911 | 1 | 9 | 4052 |
| chr7:116674913-121917354 | 10 | 44 | 5242441 |
| chr7:482867-483641 | 1 | 11 | 774 |
| chr7:76498793-76998017 | 2 | 1 | 499224 |
| chr8: 145036620-145051835 | 1 | 15 | 15215 |
| chrX: 105007860-105008004 | 1 | 1 | 144 |
| chrY: 10945178-11295108 | 2 | 11 | 349930 |

TABLE 7A

C4-2-Circle-Co-ordinate

| Chromosome | Start | End |
|---|---|---|
| chr1 | 1067955 | 1068745 |
| chr1 | 4144482 | 4144633 |
| chr1 | 4939419 | 4939672 |
| chr1 | 4939548 | 4939686 |
| chr1 | 5160160 | 5160331 |
| chr1 | 5387170 | 5387379 |
| chr1 | 5485839 | 5486113 |
| chr1 | 8026890 | 8027022 |
| chr1 | 9411125 | 9411306 |
| chr1 | 10713835 | 14744297 |
| chr1 | 11039547 | 11041749 |
| chr1 | 16049926 | 16059816 |
| chr1 | 33180948 | 33181691 |
| chr1 | 55002896 | 55003057 |
| chr1 | 61082818 | 61083762 |
| chr1 | 67685357 | 67686391 |
| chr1 | 67685367 | 67686401 |
| chr1 | 67685375 | 67686409 |
| chr1 | 155324504 | 155325367 |
| chr1 | 226024126 | 235409833 |
| chr1 | 230751770 | 230752653 |
| chr1 | 230751780 | 230752663 |
| chr1 | 230751795 | 230752666 |
| chr1 | 235078245 | 235078548 |
| chr10 | 41887628 | 41896968 |
| chr10 | 75352105 | 75352337 |
| chr10 | 84385236 | 94699052 |
| chr10 | 93635610 | 94820838 |
| chr10 | 95447028 | 95448267 |
| chr10 | 102503746 | 102504769 |
| chr10 | 121974816 | 121975166 |
| chr10 | 127016787 | 127017101 |
| chr10 | 130300872 | 130301711 |
| chr10 | 130300873 | 130301818 |
| chr10 | 130300877 | 130301822 |
| chr10 | 130301216 | 130301710 |
| chr10 | 131176467 | 131177158 |
| chr10 | 132364373 | 132364686 |
| chr11 | 50411955 | 50412827 |
| chr11 | 64500855 | 64501064 |
| chr11 | 67507943 | 67508641 |
| chr11 | 70371335 | 70371506 |
| chr11 | 101741684 | 101862965 |
| chr11 | 113934810 | 113935454 |
| chr12 | 7018519 | 7019024 |
| chr12 | 72187438 | 121352789 |
| chr12 | 108363619 | 108363988 |
| chr13 | 26972766 | 26973546 |
| chr13 | 41405577 | 41431247 |
| chr13 | 113176451 | 113176543 |
| chr13 | 113672393 | 113672556 |
| chr14 | 54396756 | 54397539 |
| chr14 | 65791577 | 65791691 |
| chr14 | 105162457 | 105162664 |
| chr14 | 105162463 | 105162692 |
| chr15 | 20818350 | 21387486 |
| chr15 | 34437411 | 34583661 |
| chr15 | 34437413 | 34583663 |
| chr15 | 34437417 | 34583667 |
| chr15 | 34437419 | 34583669 |
| chr15 | 61317774 | 61318106 |
| chr15 | 77699271 | 77699769 |
| chr15 | 77699272 | 77699834 |
| chr15 | 77699372 | 77699798 |
| chr15 | 100146720 | 100152953 |
| chr15 | 101415240 | 101415431 |
| chr16 | 3263736 | 3264539 |
| chr16 | 11517543 | 11888071 |
| chr16 | 34586256 | 34587329 |
| chr16 | 48932277 | 48932703 |
| chr16 | 75206880 | 75212516 |
| chr16 | 89566206 | 89566313 |
| chr17 | 7314901 | 43900458 |
| chr17 | 80024304 | 80024653 |
| chr17 | 80497949 | 80498109 |
| chr17 | 81416011 | 81416564 |
| chr19 | 1015734 | 1015998 |
| chr19 | 1082083 | 1082826 |
| chr19 | 3556867 | 3556992 |
| chr19 | 33249731 | 33250382 |
| chr19 | 49149355 | 49150430 |
| chr2 | 3046153 | 3046312 |
| chr2 | 11618093 | 11618226 |
| chr2 | 15047555 | 15047669 |
| chr2 | 32916230 | 65130711 |
| chr2 | 32916242 | 61471084 |
| chr2 | 32916246 | 47906689 |
| chr2 | 32916249 | 64751321 |
| chr2 | 112054511 | 112054760 |
| chr2 | 130797566 | 130798206 |
| chr2 | 131673078 | 131673984 |
| chr2 | 131673107 | 131674013 |
| chr2 | 184473608 | 184473719 |
| chr2 | 217924298 | 230067556 |
| chr2 | 238098568 | 238098659 |
| chr20 | 2379056 | 2379968 |
| chr20 | 10323922 | 10324068 |
| chr20 | 25601604 | 25601733 |
| chr20 | 29754977 | 30503718 |
| chr20 | 30503373 | 30503590 |
| chr20 | 31067989 | 31072348 |
| chr20 | 40687694 | 40688803 |
| chr20 | 43696475 | 43697012 |
| chr20 | 58695014 | 58695334 |
| chr20 | 58695051 | 58695340 |
| chr20 | 64078178 | 64078281 |
| chr21 | 41179065 | 41179572 |
| chr21 | 43792716 | 43827775 |
| chr22 | 22183015 | 22183156 |
| chr22 | 38286051 | 38522454 |
| chr22 | 49973632 | 49973802 |
| chr22 | 49973721 | 49973805 |
| chr3 | 4492336 | 4493280 |
| chr3 | 40309582 | 40310226 |
| chr3 | 57536920 | 57538314 |
| chr3 | 57536923 | 57538401 |
| chr3 | 58646722 | 58647883 |
| chr3 | 93470362 | 93470781 |
| chr3 | 93470366 | 93470787 |
| chr3 | 93470372 | 93470788 |
| chr3 | 95749272 | 95752155 |
| chr3 | 122680622 | 122681276 |
| chr3 | 187139152 | 187139665 |
| chr3 | 194943264 | 194943687 |
| chr4 | 679157 | 679270 |
| chr4 | 1808681 | 1810082 |
| chr4 | 8781387 | 8781864 |
| chr4 | 37686340 | 53393790 |
| chr4 | 49657558 | 49657703 |
| chr5 | 761866 | 762155 |
| chr5 | 1229908 | 1230139 |
| chr5 | 17712709 | 17715744 |
| chr5 | 49660052 | 49661065 |
| chr5 | 107820286 | 107926854 |
| chr5 | 134495854 | 178660760 |
| chr5 | 139452273 | 139452656 |
| chr5 | 139452276 | 139453769 |
| chr5 | 144132924 | 144135488 |
| chr5 | 162906578 | 162906821 |
| chr5 | 178585408 | 178585741 |
| chr5 | 178585545 | 178585710 |
| chr5 | 178585545 | 178585725 |
| chr5 | 178585563 | 178585740 |
| chr5 | 178585576 | 178585725 |
| chr5 | 178941268 | 178942055 |
| chr5 | 179858344 | 179858897 |
| chr6 | 1053742 | 1054031 |
| chr6 | 12012670 | 40674678 |
| chr6 | 34072812 | 34073139 |
| chr6 | 35786784 | 35799011 |
| chr6 | 44044809 | 44045014 |
| chr6 | 166381920 | 166383126 |
| chr6 | 168270042 | 168270257 |
| chr6 | 170029659 | 170030109 |
| chr7 | 467302 | 467445 |
| chr7 | 482868 | 483641 |
| chr7 | 5038077 | 5218556 |
| chr7 | 66728586 | 73967789 |
| chr7 | 66728718 | 66728824 |
| chr7 | 70855001 | 70900090 |
| chr7 | 73831397 | 73832436 |
| chr7 | 76498794 | 76998017 |
| chr7 | 98085806 | 98086636 |
| chr7 | 100952735 | 100954962 |
| chr7 | 100957483 | 100958895 |
| chr7 | 100957644 | 100958273 |
| chr7 | 100958069 | 100958902 |
| chr7 | 100967866 | 100967982 |
| chr8 | 6648888 | 6649329 |
| chr8 | 8385665 | 8386470 |
| chr8 | 22694374 | 22695375 |
| chr8 | 81029288 | 81029908 |
| chr8 | 97775153 | 97775956 |
| chr8 | 138691547 | 138692217 |
| chr8 | 138691772 | 138692274 |
| chr8 | 140457841 | 140458165 |
| chr8 | 144413370 | 144414442 |
| chr9 | 34681484 | 34681981 |
| chr9 | 109523566 | 109524282 |
| chr9 | 121464631 | 121465541 |
| chr9 | 133459570 | 133460026 |
| chr9 | 134182936 | 134183082 |
| chr9 | 135726800 | 135727090 |
| chrX | 118975462 | 118976315 |
| chrY | 10691091 | 11296015 |
| chrY | 10747321 | 56833371 |
| chrY | 10747447 | 56833370 |
| chrY | 10754890 | 56834835 |
| chrY | 10757508 | 10807352 |
| chrY | 10808562 | 56834414 |
| chrY | 10808593 | 11294557 |
| chrY | 10945179 | 11295108 |
| chrY | 10986390 | 11295108 |
| chrY | 11019390 | 56832930 |
| chrY | 11295516 | 11295812 |

TABLE 7B

OVCAR8 Circle-Co-ordinate

| Chromosome | Start | End |
|---|---|---|
| chr1 | 820254 | 821729 |
| chr1 | 5991759 | 5992492 |
| chr1 | 16049926 | 16059816 |
| chr1 | 16049943 | 16059833 |
| chr1 | 67685301 | 67686335 |
| chr1 | 68111973 | 68113082 |
| chr1 | 115337875 | 115338240 |
| chr1 | 118100880 | 118101547 |
| chr1 | 146035461 | 146036230 |
| chr1 | 169109067 | 169116581 |
| chr1 | 183635163 | 183636009 |
| chr1 | 231337501 | 231338302 |
| chr10 | 1327203 | 1328008 |
| chr10 | 1327752 | 1327998 |
| chr10 | 3171472 | 3172728 |
| chr10 | 5889307 | 5890241 |
| chr10 | 73493290 | 73902830 |
| chr10 | 73625154 | 73625998 |
| chr10 | 103457332 | 103528085 |
| chr10 | 125824767 | 125825185 |
| chr10 | 133379291 | 133380329 |
| chr11 | 32091028 | 32091715 |
| chr11 | 36361949 | 36362944 |
| chr11 | 58900904 | 59058535 |
| chr11 | 65111820 | 65112583 |
| chr11 | 65111854 | 65112617 |
| chr11 | 65454428 | 65455299 |
| chr11 | 94768278 | 94769012 |
| chr11 | 96046281 | 96049860 |
| chr11 | 131680550 | 131680810 |
| chr12 | 49188504 | 49189169 |
| chr12 | 72187438 | 121352801 |
| chr12 | 72187438 | 121352828 |
| chr12 | 106031789 | 107832773 |
| chr12 | 132394117 | 132394264 |
| chr12 | 132767162 | 132768482 |
| chr13 | 99979566 | 99980600 |
| chr14 | 22944939 | 68530452 |
| chr14 | 34993060 | 34994348 |
| chr14 | 89582374 | 89651359 |
| chr14 | 99682866 | 99684031 |
| chr15 | 34437415 | 34583665 |
| chr15 | 34437417 | 34583667 |
| chr15 | 52956597 | 52962902 |
| chr15 | 73368967 | 73370349 |
| chr16 | 180349 | 181511 |
| chr16 | 556017 | 556749 |
| chr16 | 727065 | 728199 |
| chr16 | 2897471 | 2938600 |
| chr16 | 3263738 | 3264553 |
| chr16 | 4537445 | 4538545 |
| chr16 | 11515716 | 11515802 |
| chr16 | 19167930 | 19168994 |
| chr16 | 85524999 | 85525924 |
| chr16 | 87778023 | 87779287 |
| chr16 | 88864107 | 88864190 |
| chr17 | 2393037 | 2393792 |
| chr17 | 2548168 | 2548359 |
| chr17 | 2719771 | 2719870 |
| chr17 | 4949070 | 4950160 |
| chr17 | 21512856 | 21513067 |
| chr17 | 48489520 | 48495417 |
| chr17 | 73311110 | 73312131 |
| chr17 | 82022150 | 82023088 |
| chr18 | 2655698 | 2656500 |
| chr18 | 23585472 | 23586444 |
| chr18 | 78865825 | 78865986 |
| chr19 | 2247066 | 2247173 |
| chr19 | 5804123 | 5804956 |
| chr19 | 38361959 | 38362711 |
| chr19 | 43533437 | 43534093 |
| chr19 | 50717378 | 50718792 |
| chr19 | 50965118 | 50979784 |
| chr2 | 15275199 | 15698869 |
| chr2 | 26344760 | 26346102 |
| chr2 | 32916239 | 61694863 |
| chr2 | 32916240 | 47906682 |
| chr2 | 32916240 | 62705935 |
| chr2 | 32916241 | 47906684 |
| chr2 | 32916242 | 47906659 |
| chr2 | 32916242 | 47906684 |
| chr2 | 32916242 | 65130709 |
| chr2 | 32916242 | 65130722 |
| chr2 | 32916243 | 47906659 |
| chr2 | 32916243 | 47906684 |
| chr2 | 32916243 | 65130696 |
| chr2 | 32916243 | 65130723 |
| chr2 | 32916244 | 65130723 |
| chr2 | 32916249 | 47906652 |
| chr2 | 32916249 | 47906692 |
| chr2 | 32916249 | 63050778 |
| chr2 | 32916251 | 63050764 |
| chr2 | 32916485 | 68252667 |
| chr2 | 32916486 | 68252644 |
| chr2 | 64751429 | 64752103 |
| chr2 | 95345680 | 95346417 |
| chr2 | 112054511 | 112054755 |
| chr2 | 112054511 | 112054760 |
| chr2 | 112054517 | 112054766 |
| chr2 | 112054521 | 112054770 |
| chr2 | 112054540 | 112054789 |
| chr2 | 120344562 | 120345151 |
| chr2 | 130797589 | 130798201 |
| chr2 | 131673097 | 131674003 |
| chr2 | 149770397 | 149770867 |
| chr2 | 217924298 | 230067554 |
| chr2 | 232316045 | 232317104 |
| chr2 | 238136072 | 238170279 |
| chr2 | 240565954 | 240566669 |
| chr20 | 4686300 | 4687201 |
| chr20 | 47390643 | 47392362 |
| chr20 | 50058565 | 50059626 |
| chr20 | 62321196 | 62321566 |
| chr20 | 63626131 | 63626529 |
| chr20 | 63864274 | 63864949 |
| chr21 | 36698450 | 36699153 |
| chr21 | 41641805 | 41645951 |
| chr21 | 44276504 | 44287965 |
| chr22 | 41022258 | 41099935 |
| chr22 | 49954522 | 50077839 |
| chr22 | 50526222 | 50527277 |
| chr3 | 4492336 | 4493280 |
| chr3 | 39151021 | 39151883 |
| chr3 | 49903154 | 49903959 |
| chr3 | 62102209 | 62134661 |
| chr3 | 93470432 | 93470782 |
| chr3 | 136196102 | 136196691 |
| chr3 | 185841649 | 185842697 |
| chr3 | 186107709 | 186109107 |
| chr3 | 187908289 | 188155866 |
| chr4 | 8409618 | 8409856 |
| chr4 | 123200629 | 123237107 |
| chr5 | 72308111 | 72308619 |
| chr5 | 75672824 | 75672958 |
| chr5 | 141556735 | 141557945 |
| chr5 | 172869377 | 172870408 |
| chr5 | 180027197 | 180027869 |
| chr5 | 180292079 | 180293203 |
| chr6 | 10412434 | 10413454 |
| chr6 | 54059859 | 54063910 |
| chr6 | 73520186 | 73521216 |
| chr7 | 1940927 | 1941012 |
| chr7 | 65038261 | 65873269 |
| chr7 | 65038264 | 65873256 |
| chr7 | 74224754 | 74266926 |
| chr7 | 96953101 | 96953331 |
| chr7 | 96953107 | 96953337 |
| chr7 | 116525211 | 116526304 |
| chr7 | 155347769 | 155348946 |
| chr8 | 6648888 | 6649329 |
| chr8 | 10358133 | 10358945 |
| chr8 | 43776203 | 43780756 |
| chr8 | 46232819 | 46233833 |
| chr8 | 46326736 | 46327963 |
| chr8 | 97775153 | 97775956 |
| chr8 | 106950568 | 140950071 |
| chr8 | 124172009 | 127735305 |
| chr8 | 132926653 | 132931277 |
| chr8 | 142470915 | 142472027 |
| chr8 | 142675202 | 142676313 |
| chr8 | 143936732 | 143937961 |
| chr9 | 29101300 | 29212824 |
| chr9 | 91711805 | 91711994 |
| chr9 | 124300966 | 124301913 |
| chr9 | 124475741 | 124513868 |
| chr9 | 128702455 | 128703411 |
| chr9 | 128702509 | 128703378 |
| chr9 | 136841161 | 136842352 |
| chr9 | 137085966 | 137086993 |
| chrX | 23776133 | 23789070 |
| chrX | 109626770 | 111410864 |

TABLE 8A

GBM-Circle-Co-ordinate

| Chromosome | Start | End |
|---|---|---|
| chr1 | 64966005 | 64966496 |
| chr1 | 84504918 | 84506819 |
| chr1 | 84583988 | 84584807 |
| chr1 | 145766785 | 180632057 |
| chr1 | 151196520 | 174925904 |
| chr1 | 151196522 | 174925904 |
| chr1 | 153725238 | 184792551 |
| chr1 | 154405472 | 163071873 |
| chr1 | 154845372 | 184386914 |
| chr1 | 154972744 | 154974193 |
| chr1 | 155001928 | 155002212 |
| chr1 | 155060293 | 155061294 |
| chr1 | 155127314 | 155127819 |
| chr1 | 155255048 | 155255453 |
| chr1 | 156049807 | 156050565 |
| chr1 | 156668047 | 180911938 |
| chr1 | 156669826 | 156671068 |
| chr1 | 156751557 | 156752007 |
| chr1 | 160205363 | 160205955 |
| chr1 | 161193281 | 161194054 |
| chr1 | 161973884 | 161974485 |
| chr1 | 166973577 | 185045404 |
| chr1 | 172042525 | 172043191 |
| chr1 | 179229435 | 179230029 |
| chr1 | 180581079 | 180582589 |
| chr1 | 181033847 | 211402298 |
| chr1 | 182390614 | 182391699 |
| chr1 | 182782444 | 182783301 |
| chr1 | 183023187 | 183023614 |
| chr1 | 183635172 | 183635927 |
| chr1 | 183982735 | 183984414 |
| chr1 | 184387029 | 184387764 |
| chr1 | 197274106 | 197275027 |
| chr1 | 200487879 | 200670105 |
| chr1 | 200487881 | 200670105 |
| chr1 | 200519011 | 216682930 |
| chr1 | 200738793 | 200739587 |
| chr1 | 201829091 | 201829574 |
| chr1 | 201885750 | 201886886 |
| chr1 | 201888629 | 201888930 |
| chr1 | 202624523 | 202624815 |
| chr1 | 203762608 | 205210542 |
| chr1 | 203795861 | 203796446 |
| chr1 | 203918512 | 203920808 |
| chr1 | 204075317 | 204076435 |
| chr1 | 204088274 | 204089351 |
| chr1 | 204113681 | 204114651 |
| chr1 | 204195186 | 204195272 |
| chr1 | 204359455 | 204360458 |
| chr1 | 204693110 | 204693871 |
| chr1 | 204870665 | 204871285 |
| chr1 | 209217822 | 220644618 |
| chr1 | 212558445 | 212559077 |
| chr1 | 218164711 | 218165595 |
| chr1 | 221742469 | 221742697 |
| chr1 | 224132159 | 224132788 |
| chr1 | 228082971 | 228083950 |
| chr1 | 228166243 | 228166863 |
| chr1 | 230792727 | 230793627 |
| chr1 | 236142439 | 236143373 |
| chr1 | 239805359 | 239806557 |
| chr1 | 244834480 | 244835214 |
| chr1 | 244835295 | 244835819 |
| chr1 | 244863672 | 244864439 |
| chr1 | 244863744 | 244864625 |
| chr1 | 247112014 | 247112822 |
| chr10 | 598527 | 21522293 |
| chr10 | 688838 | 689479 |
| chr10 | 780276 | 1156914 |
| chr10 | 3838638 | 3838840 |
| chr10 | 4556448 | 4556820 |
| chr10 | 6055951 | 6750243 |
| chr10 | 6145120 | 6145826 |
| chr10 | 7526614 | 7526796 |
| chr10 | 11178077 | 11178772 |
| chr10 | 12780179 | 12780565 |
| chr10 | 13398035 | 13398444 |
| chr10 | 13759218 | 13759711 |
| chr12 | 1051503 | 18850669 |
| chr12 | 1629491 | 1630454 |
| chr12 | 1936233 | 1937034 |
| chr12 | 2269978 | 2271177 |
| chr12 | 2485455 | 49869926 |
| chr12 | 3218682 | 3219921 |
| chr12 | 3290825 | 3291611 |
| chr12 | 4271222 | 34163846 |
| chr12 | 4275095 | 4275562 |
| chr12 | 4661540 | 4926117 |
| chr12 | 4809311 | 4809579 |
| chr12 | 4909301 | 4909961 |
| chr12 | 5375582 | 7848472 |
| chr12 | 6085714 | 22046642 |
| chr12 | 6200410 | 6201491 |
| chr12 | 6310554 | 6310838 |
| chr12 | 6340972 | 6342141 |
| chr12 | 6451582 | 6452683 |
| chr12 | 6470758 | 6471073 |
| chr12 | 6493271 | 6493921 |
| chr12 | 6532407 | 6532987 |
| chr12 | 6541709 | 6542424 |
| chr12 | 6555369 | 6556134 |
| chr12 | 6612918 | 9065165 |
| chr12 | 6689008 | 6689534 |
| chr12 | 6872549 | 6873498 |
| chr12 | 6872561 | 6873630 |
| chr12 | 6872570 | 6873414 |
| chr12 | 6872609 | 6873364 |
| chr12 | 6943981 | 6944747 |
| chr12 | 7017979 | 7018629 |
| chr12 | 9406057 | 9406815 |
| chr12 | 11106587 | 11141418 |
| chr12 | 11171204 | 11171665 |
| chr12 | 11193559 | 21401648 |
| chr12 | 13140151 | 13140423 |
| chr12 | 13989044 | 31119083 |
| chr12 | 14677102 | 14677517 |
| chr12 | 16028932 | 28312310 |
| chr12 | 16069154 | 16069535 |
| chr12 | 17309333 | 51365826 |
| chr12 | 18853138 | 38427804 |
| chr12 | 19573695 | 19574034 |
| chr12 | 19997967 | 19998683 |
| chr12 | 22312201 | 43083671 |
| chr12 | 22479040 | 46245879 |
| chr12 | 23557106 | 23557457 |
| chr12 | 24074602 | 43435680 |
| chr12 | 26294989 | 26295205 |
| chr12 | 27003157 | 27003358 |
| chr12 | 27780252 | 27780503 |
| chr12 | 28229211 | 42511702 |
| chr12 | 30985473 | 30986124 |
| chr12 | 31035894 | 31036710 |
| chr12 | 31253062 | 31253426 |
| chr12 | 31325580 | 31326390 |
| chr12 | 32679300 | 32679800 |
| chr12 | 57520779 | 57738877 |
| chr12 | 57613669 | 57849420 |
| chr12 | 57626258 | 57627487 |
| chr12 | 57743299 | 57744699 |
| chr12 | 57752087 | 57752409 |
| chr12 | 57845558 | 57846484 |
| chr12 | 57845752 | 57846204 |
| chr12 | 57846369 | 57847180 |
| chr12 | 57846463 | 57847047 |
| chr12 | 57846607 | 57847165 |
| chr12 | 57846622 | 57847163 |
| chr12 | 64183437 | 64201818 |
| chr12 | 64205591 | 64205832 |
| chr12 | 68808057 | 68808821 |
| chr12 | 68808072 | 68808663 |
| chr12 | 68808084 | 68808848 |
| chr12 | 68808088 | 68808852 |
| chr12 | 68854394 | 68854717 |
| chr12 | 70243203 | 70243710 |
| chr12 | 70339104 | 70340286 |
| chr12 | 70366131 | 70366634 |
| chr13 | 98142478 | 98143018 |
| chr14 | 21069214 | 21070150 |
| chr16 | 17069197 | 17069872 |
| chr2 | 119759550 | 119760206 |
| chr2 | 120243329 | 120244353 |
| chr2 | 120323288 | 120324584 |
| chr2 | 120343530 | 120344263 |
| chr2 | 120874171 | 120874482 |
| chr2 | 121284318 | 121285387 |
| chr2 | 121736950 | 121737144 |
| chr20 | 50587642 | 50588296 |
| chr20 | 62763506 | 62764448 |
| chr21 | 36156615 | 36157286 |
| chr3 | 1380642 | 16916542 |
| chr3 | 1381023 | 18524644 |
| chr3 | 2005622 | 9749637 |
| chr3 | 2055313 | 24426507 |
| chr3 | 2114929 | 12975877 |
| chr3 | 2653647 | 26661140 |
| chr3 | 3836140 | 3836924 |
| chr3 | 4451973 | 13005987 |
| chr3 | 4492394 | 4493265 |
| chr3 | 4610793 | 9344482 |
| chr3 | 4978519 | 4979468 |
| chr3 | 4978882 | 4979293 |
| chr3 | 4979481 | 4980525 |
| chr3 | 4979483 | 4980521 |
| chr3 | 4979483 | 4980527 |
| chr3 | 7611126 | 7612684 |
| chr3 | 9396910 | 9397426 |
| chr3 | 9397090 | 9397599 |
| chr3 | 9397105 | 9397600 |
| chr3 | 9664961 | 15227004 |
| chr3 | 9729591 | 9731053 |
| chr3 | 9731442 | 9732193 |
| chr3 | 9731464 | 9732452 |
| chr3 | 9750451 | 10244242 |
| chr3 | 9769731 | 9770698 |
| chr3 | 9867287 | 35069346 |
| chr3 | 9900901 | 12659483 |
| chr3 | 10011673 | 24519362 |
| chr3 | 10192254 | 10192829 |
| chr3 | 11558344 | 38758954 |
| chr3 | 12695080 | 31891110 |
| chr3 | 12877258 | 12878051 |
| chr3 | 14505385 | 14506337 |
| chr3 | 14952240 | 14953093 |
| chr3 | 14989937 | 32728446 |
| chr3 | 15070016 | 15070414 |
| chr3 | 15859863 | 15860748 |
| chr3 | 16838193 | 32432716 |
| chr3 | 23643946 | 23644017 |
| chr3 | 24690698 | 24690891 |
| chr3 | 24727339 | 33441283 |
| chr3 | 30120884 | 30121481 |
| chr3 | 31532404 | 31533455 |
| chr3 | 31532573 | 31533170 |
| chr3 | 38024871 | 38025569 |
| chr5 | 38424982 | 38425801 |
| chr5 | 112876503 | 113477413 |
| chr5 | 112921709 | 112922234 |
| chr6 | 170553341 | 170554228 |
| chr6 | 170553353 | 170554229 |
| chr7 | 566477 | 3120272 |
| chr7 | 758064 | 1504364 |
| chr7 | 816235 | 5423957 |
| chr7 | 842893 | 844114 |
| chr7 | 877149 | 877905 |
| chr7 | 1675652 | 1676485 |
| chr7 | 1863141 | 1863832 |
| chr7 | 2051611 | 2051865 |
| chr7 | 2108812 | 2109408 |
| chr7 | 2518869 | 2519545 |
| chr7 | 2555139 | 2555791 |
| chr7 | 2555160 | 2555801 |
| chr7 | 2824330 | 2824981 |
| chr7 | 4568973 | 22645954 |
| chr7 | 5189908 | 5190401 |
| chr7 | 5314533 | 32640868 |
| chr7 | 5419279 | 5419771 |
| chr7 | 5422649 | 5423318 |
| chr7 | 5423213 | 5423719 |
| chr7 | 5423262 | 5423997 |
| chr7 | 5423619 | 15097133 |
| chr7 | 5424177 | 5424561 |
| chr7 | 5426567 | 5427418 |
| chr7 | 5426767 | 5427458 |
| chr7 | 5427958 | 5428420 |
| chr7 | 5495052 | 5495870 |
| chr7 | 5529611 | 5529881 |
| chr7 | 5555319 | 5556379 |
| chr7 | 5562478 | 5562829 |
| chr7 | 5562868 | 5563736 |
| chr7 | 5940928 | 24290822 |
| chr7 | 6348164 | 6348830 |
| chr7 | 6663591 | 6664181 |
| chr7 | 7182565 | 7183366 |
| chr7 | 7182583 | 7183371 |
| chr7 | 7182583 | 7183379 |
| chr7 | 7366485 | 7366813 |
| chr7 | 7968806 | 7969213 |
| chr7 | 8211746 | 8212824 |
| chr7 | 12686862 | 12687366 |
| chr7 | 15685536 | 15686608 |
| chr7 | 16172291 | 16172842 |
| chr7 | 16645029 | 16646144 |
| chr7 | 16645029 | 16646148 |
| chr7 | 16791061 | 45161749 |
| chr7 | 17939839 | 17940206 |
| chr7 | 20785002 | 20785994 |
| chr7 | 22068591 | 28214477 |
| chr7 | 23112529 | 52333389 |
| chr7 | 23467960 | 23468957 |
| chr7 | 23531548 | 23532064 |
| chr7 | 23597308 | 23597875 |
| chr7 | 23597313 | 23597804 |
| chr7 | 24979521 | 24980211 |
| chr7 | 25358811 | 25359654 |
| chr7 | 26199862 | 26200872 |
| chr7 | 26200157 | 26200758 |
| chr7 | 26201589 | 26202167 |
| chr7 | 26201688 | 26202187 |
| chr7 | 26201726 | 26202319 |
| chr7 | 26398232 | 26399115 |
| chr7 | 26398593 | 26399104 |
| chr7 | 27932817 | 27933015 |
| chr7 | 28093785 | 28094825 |
| chr7 | 28728202 | 28729424 |
| chr7 | 28955818 | 28956631 |
| chr7 | 28957165 | 28957688 |
| chr7 | 29684991 | 29685594 |
| chr7 | 29807241 | 29808597 |
| chr7 | 29923911 | 38032345 |
| chr7 | 30134699 | 30134912 |
| chr7 | 30284567 | 30285288 |
| chr7 | 30403177 | 63833641 |
| chr7 | 30859768 | 30860226 |
| chr7 | 30970589 | 30971398 |
| chr7 | 30988565 | 30989242 |
| chr7 | 31028953 | 31029537 |
| chr7 | 32495247 | 32495425 |
| chr7 | 32495247 | 44290368 |
| chr7 | 32495339 | 75637995 |
| chr7 | 32495387 | 32495854 |
| chr7 | 32495526 | 32496384 |
| chr7 | 32891299 | 32891736 |
| chr7 | 32891332 | 32891664 |
| chr7 | 32891376 | 32891725 |
| chr7 | 32891463 | 32891863 |
| chr7 | 32940937 | 32941877 |
| chr7 | 33106283 | 66690235 |
| chr7 | 33905330 | 75753251 |
| chr7 | 36152917 | 36153180 |
| chr7 | 37447873 | 37448658 |
| chr7 | 37448461 | 37449012 |
| chr7 | 37694432 | 37695074 |
| chr7 | 38630872 | 38631407 |
| chr7 | 40134689 | 40134993 |
| chr7 | 42882780 | 42883423 |
| chr7 | 43113002 | 43113288 |
| chr7 | 43302658 | 43303286 |
| chr7 | 43621564 | 73584455 |
| chr7 | 44104256 | 44104976 |
| chr7 | 44258666 | 44259720 |
| chr7 | 44283601 | 44284382 |
| chr7 | 44748481 | 44748778 |
| chr7 | 44759879 | 44760721 |
| chr7 | 44847897 | 44848215 |
| chr7 | 45221571 | 45222265 |
| chr7 | 46445954 | 47791231 |
| chr7 | 47498274 | 47498915 |
| chr7 | 47669120 | 47669934 |
| chr7 | 48089080 | 48089762 |
| chr7 | 48089085 | 48089687 |
| chr7 | 48089088 | 48089687 |
| chr7 | 51315667 | 51316488 |
| chr7 | 54540504 | 55427933 |
| chr7 | 54545917 | 69728178 |
| chr7 | 54545918 | 69728179 |
| chr7 | 54545919 | 69728180 |
| chr7 | 54545920 | 69728181 |
| chr7 | 54546741 | 95435111 |
| chr7 | 54559198 | 85891526 |
| chr7 | 54574602 | 54574764 |
| chr7 | 54664661 | 54665262 |
| chr7 | 54719572 | 54719673 |
| chr7 | 54749370 | 54749455 |
| chr7 | 54759297 | 54759989 |
| chr7 | 54772112 | 54772260 |
| chr7 | 54838829 | 54839962 |
| chr7 | 54842242 | 55144987 |
| chr7 | 54926047 | 54926501 |
| chr7 | 54934716 | 54934948 |
| chr7 | 54990188 | 54990444 |
| chr7 | 55019041 | 55019493 |
| chr7 | 55019425 | 55020289 |
| chr7 | 55019432 | 55020296 |
| chr7 | 55065796 | 63833642 |
| chr7 | 55079061 | 55079886 |
| chr7 | 55079340 | 55079543 |
| chr7 | 55096317 | 55096604 |
| chr7 | 55099112 | 55100172 |
| chr7 | 55121709 | 55121815 |
| chr7 | 55204534 | 55204714 |
| chr7 | 55204599 | 55205038 |
| chr7 | 55248874 | 103726868 |
| chr7 | 55254946 | 55255061 |
| chr7 | 55357825 | 55358406 |
| chr7 | 55365588 | 55366305 |
| chr7 | 55365882 | 55366595 |
| chr7 | 55365931 | 55366287 |
| chr7 | 55462619 | 100121157 |
| chr7 | 55476188 | 55476717 |
| chr7 | 55522676 | 55523553 |
| chr7 | 55887679 | 55887846 |
| chr7 | 55911573 | 55911992 |
| chr7 | 57217223 | 57218360 |
| chr7 | 57377436 | 57378568 |
| chr7 | 62306503 | 62307437 |
| chr7 | 63887444 | 63887972 |
| chr7 | 64375052 | 64376339 |
| chr7 | 64666513 | 64667690 |
| chr7 | 64876998 | 64877594 |
| chr7 | 65038263 | 65873256 |
| chr7 | 65872920 | 106101470 |
| chr7 | 66557799 | 66558602 |
| chr7 | 66804821 | 66805770 |
| chr7 | 66869598 | 102121355 |
| chr7 | 68423209 | 68423933 |
| chr7 | 68517194 | 68518274 |
| chr7 | 68677651 | 68678666 |
| chr7 | 69597442 | 69598054 |
| chr7 | 70789656 | 70790299 |
| chr7 | 71289453 | 71290476 |
| chr7 | 71617312 | 77654871 |
| chr7 | 72536159 | 74975729 |
| chr7 | 73521985 | 73522415 |
| chr7 | 73521992 | 73522796 |
| chr7 | 73578686 | 73578791 |
| chr7 | 73578687 | 73578976 |
| chr7 | 73578694 | 73578983 |
| chr7 | 73578748 | 73578915 |
| chr7 | 73578771 | 73578964 |
| chr7 | 73578776 | 73578952 |
| chr7 | 73842536 | 73842691 |
| chr7 | 74026955 | 74027774 |
| chr7 | 74289392 | 74290297 |
| chr7 | 74302637 | 74303194 |
| chr7 | 74422001 | 74422802 |
| chr7 | 74561334 | 101816538 |
| chr7 | 74658175 | 74658548 |
| chr7 | 75444254 | 123535082 |
| chr7 | 75992296 | 75992692 |
| chr7 | 76294304 | 76295059 |
| chr7 | 76358986 | 76359299 |
| chr7 | 77537713 | 77538438 |
| chr7 | 77537723 | 77538438 |
| chr7 | 77588904 | 116328871 |
| chr7 | 77696392 | 77697132 |
| chr7 | 81853877 | 106101475 |
| chr7 | 82443567 | 82443852 |
| chr7 | 87152373 | 87153302 |
| chr7 | 87380245 | 87380395 |
| chr7 | 87768643 | 87768844 |
| chr7 | 90595890 | 90596258 |
| chr7 | 92081964 | 92084396 |
| chr7 | 92836599 | 92837103 |
| chr7 | 94340036 | 120262455 |
| chr7 | 94634392 | 94634500 |
| chr7 | 94908687 | 107169546 |
| chr7 | 95751905 | 95752261 |
| chr7 | 98088714 | 98088906 |
| chr7 | 98281258 | 98281695 |
| chr7 | 98400467 | 98401208 |
| chr7 | 98548211 | 98548642 |
| chr7 | 99142564 | 99143110 |
| chr7 | 99877866 | 148369220 |
| chr7 | 100081857 | 100082693 |
| chr7 | 100101489 | 130784620 |
| chr7 | 100468315 | 100469342 |
| chr7 | 100468331 | 100469398 |
| chr7 | 100587964 | 100588171 |
| chr7 | 100675497 | 100676030 |
| chr7 | 100705393 | 100705992 |
| chr7 | 100866346 | 100867206 |
| chr7 | 100895014 | 100895426 |
| chr7 | 101121857 | 117337557 |
| chr7 | 101217022 | 101217660 |
| chr7 | 101244454 | 129311994 |
| chr7 | 101858629 | 125702323 |
| chr7 | 105012691 | 105013444 |
| chr7 | 105012765 | 105013599 |
| chr7 | 105388499 | 105388955 |
| chr7 | 106176892 | 106178314 |
| chr7 | 106660459 | 106661008 |
| chr7 | 107126552 | 107127207 |
| chr7 | 107168928 | 107169747 |
| chr7 | 107169128 | 107169574 |
| chr7 | 107186271 | 145657553 |
| chr7 | 107743642 | 107744135 |
| chr7 | 109153735 | 158599032 |
| chr7 | 109346908 | 138903813 |
| chr7 | 112428974 | 112430025 |
| chr7 | 112939041 | 112940148 |
| chr7 | 116354371 | 116355362 |
| chr7 | 116862495 | 116862972 |
| chr7 | 117289680 | 117290731 |
| chr7 | 117732730 | 117733101 |
| chr7 | 121050433 | 125702330 |
| chr7 | 121390856 | 130441327 |
| chr7 | 121396009 | 121396443 |
| chr7 | 121485754 | 121486229 |
| chr7 | 121798039 | 125702326 |
| chr7 | 121825548 | 135504503 |
| chr7 | 121872967 | 121873770 |
| chr7 | 121873145 | 121873685 |
| chr7 | 122007955 | 122008215 |
| chr7 | 122143434 | 122144109 |
| chr7 | 122315074 | 122315852 |
| chr7 | 122422454 | 128770627 |
| chr7 | 123534689 | 123535138 |
| chr7 | 123534750 | 123535260 |
| chr7 | 123534755 | 123535059 |
| chr7 | 123534843 | 123535240 |
| chr7 | 123714643 | 123716017 |
| chr7 | 123748665 | 123749070 |
| chr7 | 124032255 | 124032938 |
| chr7 | 124939324 | 138460175 |
| chr7 | 127392315 | 127392825 |
| chr7 | 127651045 | 127651928 |
| chr7 | 127800020 | 127800741 |
| chr7 | 127903724 | 127904867 |
| chr7 | 128830311 | 128831046 |
| chr7 | 128830313 | 128831038 |
| chr7 | 128836207 | 128837171 |
| chr7 | 128938079 | 128938889 |
| chr7 | 129210368 | 129210929 |
| chr7 | 129825579 | 129826004 |
| chr7 | 129952727 | 129953080 |
| chr7 | 131449613 | 137207190 |
| chr7 | 131620083 | 131621066 |
| chr7 | 134458931 | 134459339 |
| chr7 | 134740335 | 134742448 |
| chr7 | 135147705 | 135148595 |
| chr7 | 135170484 | 135170768 |
| chr7 | 135430518 | 135431214 |
| chr7 | 135508978 | 135509869 |
| chr7 | 135662425 | 135662736 |
| chr7 | 135662441 | 135662961 |
| chr7 | 135662454 | 135662962 |
| chr7 | 138001666 | 138002157 |
| chr7 | 138460328 | 138460974 |
| chr7 | 139359071 | 139359698 |
| chr7 | 139359743 | 139360454 |
| chr7 | 139359747 | 139360458 |
| chr7 | 139359776 | 139360528 |
| chr7 | 139359788 | 139360534 |
| chr7 | 140696710 | 140697173 |
| chr7 | 141073471 | 141074117 |
| chr7 | 141824552 | 141825288 |
| chr7 | 143062564 | 143063056 |
| chr7 | 143288138 | 143288708 |
| chr7 | 143381736 | 143382434 |
| chr7 | 143883721 | 143885562 |
| chr7 | 145264055 | 145264395 |
| chr7 | 148550876 | 148552123 |
| chr7 | 148699203 | 148699817 |
| chr7 | 148869198 | 148869792 |
| chr7 | 148884707 | 148884923 |
| chr7 | 149090889 | 149091542 |
| chr7 | 149126066 | 149126864 |
| chr7 | 149126408 | 149126872 |
| chr7 | 149262041 | 149262481 |
| chr7 | 150378525 | 150379249 |
| chr7 | 150378535 | 150379238 |
| chr7 | 150404928 | 150405365 |
| chr7 | 150799961 | 150800560 |
| chr7 | 150800045 | 150800765 |
| chr7 | 151058236 | 151059510 |
| chr7 | 151080866 | 151081399 |
| chr7 | 151086835 | 151087474 |
| chr7 | 151794821 | 151795362 |
| chr7 | 151876086 | 151876757 |
| chr7 | 151876202 | 151876600 |
| chr7 | 152392257 | 152392614 |
| chr7 | 153748481 | 153749090 |
| chr7 | 153886922 | 153887320 |
| chr7 | 155207901 | 155208612 |
| chr7 | 155408388 | 155408755 |
| chr7 | 155456329 | 155457416 |
| chr7 | 155456466 | 155457437 |
| chr7 | 155482110 | 155482685 |
| chr7 | 155644024 | 155644650 |
| chr7 | 155996333 | 155997001 |
| chr7 | 156892725 | 156893279 |
| chr7 | 156892783 | 156893280 |
| chr7 | 157336503 | 157337226 |
| chr7 | 157480457 | 157480524 |
| chr7 | 157776206 | 157776878 |
| chr7 | 157942369 | 157943054 |
| chr7 | 158337001 | 158337867 |
| chr7 | 158387515 | 158387575 |
| chr7 | 158389650 | 158390273 |

TABLE 8B

LGG-Circle-Co-ordinate

| Chromosome | Start | End |
|---|---|---|
| chr10 | 451780 | 452902 |
| chr10 | 622240 | 623211 |
| chr10 | 627326 | 628393 |
| chr10 | 931481 | 931774 |
| chr10 | 1048924 | 1049215 |
| chr10 | 2791713 | 2792118 |
| chr10 | 2909221 | 2909421 |
| chr10 | 7526685 | 7526946 |
| chr10 | 10364731 | 10364943 |
| chr10 | 12042910 | 12043368 |
| chr10 | 13468136 | 13468347 |
| chr10 | 14009518 | 14010158 |
| chr10 | 15638355 | 15638557 |
| chr10 | 17462254 | 17462602 |
| chr10 | 23105352 | 23105566 |
| chr10 | 27972102 | 27972318 |
| chr10 | 28866078 | 28866498 |
| chr10 | 35167435 | 35167649 |
| chr10 | 35217923 | 35218479 |
| chr10 | 35399613 | 35399817 |
| chr11 | 27718480 | 27719071 |
| chr11 | 28824878 | 36215494 |
| chr11 | 29133708 | 29430833 |
| chr11 | 30361399 | 30361786 |
| chr11 | 31877072 | 36188811 |
| chr11 | 34051927 | 34089285 |
| chr11 | 36412110 | 36417948 |
| chr11 | 40757804 | 40758177 |
| chr11 | 41020557 | 41020792 |
| chr11 | 41993131 | 41993746 |
| chr12 | 1220611 | 1220987 |
| chr12 | 1887173 | 1887629 |
| chr12 | 2566230 | 2567218 |
| chr12 | 2655959 | 2656384 |
| chr12 | 3873162 | 3873501 |
| chr12 | 4269455 | 4269935 |
| chr12 | 4808968 | 4809346 |
| chr12 | 6201406 | 6202487 |
| chr12 | 14416728 | 14417905 |
| chr12 | 14416733 | 14417910 |
| chr12 | 22334674 | 22335314 |
| chr12 | 23950012 | 23951025 |
| chr12 | 24550846 | 24551366 |
| chr12 | 24562189 | 24562739 |
| chr12 | 25250528 | 25250832 |
| chr12 | 25385573 | 25386229 |
| chr12 | 25590144 | 25591139 |
| chr12 | 26122251 | 26122607 |
| chr12 | 26126211 | 26126673 |
| chr12 | 26318709 | 26319740 |
| chr12 | 123269376 | 123269728 |
| chr12 | 124564923 | 124565634 |
| chr12 | 124633178 | 124633548 |
| chr12 | 124704862 | 124705613 |
| chr12 | 124876311 | 124876701 |
| chr13 | 31161065 | 31162109 |
| chr13 | 31161760 | 31162411 |
| chr13 | 32171921 | 32172085 |
| chr13 | 33312426 | 33313993 |
| chr13 | 39602796 | 39603394 |
| chr13 | 42373132 | 42373518 |
| chr13 | 43357313 | 43358580 |
| chr13 | 43787270 | 43787806 |
| chr13 | 44905256 | 44906942 |
| chr13 | 45340620 | 45341216 |
| chr15 | 77544262 | 77544752 |
| chr15 | 77631823 | 77632422 |
| chr15 | 77658254 | 78304292 |
| chr2 | 15801996 | 15802226 |
| chr2 | 15948390 | 15948633 |
| chr2 | 16052063 | 16452027 |
| chr2 | 16177696 | 17516120 |
| chr2 | 16203188 | 16314758 |
| chr2 | 16225124 | 16226720 |
| chr2 | 16392024 | 16392729 |
| chr2 | 16567034 | 17412029 |
| chr2 | 17051859 | 17051967 |
| chr2 | 17192282 | 17192652 |
| chr2 | 17279980 | 17334701 |
| chr2 | 17296668 | 17297551 |
| chr2 | 17584356 | 17877776 |
| chr20 | 21101875 | 21103066 |
| chr20 | 21102035 | 21103071 |
| chr20 | 21507504 | 21508584 |
| chr20 | 21510732 | 21511606 |
| chr20 | 21559646 | 21560756 |
| chr20 | 61331561 | 61331713 |
| chr20 | 61636004 | 61636722 |
| chr20 | 62302171 | 62302425 |
| chr20 | 62727606 | 62728174 |
| chr20 | 62753728 | 62754298 |
| chr20 | 62950883 | 62952025 |
| chr21 | 44763786 | 44764391 |
| chr22 | 17158717 | 17159102 |
| chr22 | 17370270 | 17370659 |
| chr22 | 17556835 | 17557856 |
| chr22 | 17948634 | 17948855 |
| chr22 | 19122051 | 19122480 |
| chr22 | 19397634 | 19398790 |
| chr22 | 19431813 | 19432298 |
| chr22 | 19431816 | 19432690 |
| chr22 | 19447504 | 19447908 |
| chr22 | 19456815 | 29346704 |
| chr22 | 19714547 | 19714863 |
| chr22 | 19892999 | 19894058 |
| chr22 | 20120953 | 20121786 |
| chr22 | 20438002 | 20439089 |
| chr22 | 21924540 | 21925240 |
| chr22 | 21959628 | 21960328 |
| chr22 | 22294833 | 22295899 |
| chr22 | 22629577 | 23309299 |
| chr22 | 23070251 | 50323770 |
| chr22 | 23117779 | 23118223 |
| chr22 | 23217793 | 23219197 |
| chr22 | 23289419 | 23290788 |
| chr22 | 23894378 | 23895015 |
| chr22 | 24155288 | 24155986 |
| chr22 | 24554935 | 24555855 |
| chr22 | 24588479 | 24588978 |
| chr22 | 24599340 | 50185758 |
| chr22 | 27918865 | 27919304 |
| chr22 | 29312278 | 29312617 |
| chr22 | 29633586 | 29634532 |
| chr22 | 29703122 | 29703716 |
| chr22 | 30278275 | 30279505 |
| chr22 | 30305822 | 30307111 |
| chr22 | 30322022 | 30322713 |
| chr22 | 30423106 | 30423870 |
| chr22 | 31160519 | 31161285 |
| chr22 | 32994230 | 32995146 |
| chr22 | 35350568 | 35350924 |
| chr22 | 36386364 | 36387078 |
| chr22 | 36765056 | 36766037 |
| chr22 | 37546198 | 37547135 |
| chr22 | 37639118 | 37639707 |
| chr22 | 37802494 | 37803082 |
| chr22 | 37903524 | 37904732 |
| chr22 | 37933195 | 37933868 |
| chr22 | 38172230 | 38173202 |
| chr22 | 38316214 | 38316905 |
| chr22 | 39520512 | 39521118 |
| chr22 | 40636219 | 40636743 |
| chr22 | 41362208 | 41363117 |
| chr22 | 41381981 | 41382237 |
| chr22 | 41446894 | 41447916 |
| chr22 | 41620416 | 41621041 |
| chr22 | 41951103 | 41951997 |
| chr22 | 43219896 | 43220416 |
| chr22 | 44072194 | 44073291 |
| chr22 | 45268219 | 45268688 |
| chr22 | 45671838 | 45672262 |
| chr22 | 45963749 | 45965072 |
| chr22 | 46006482 | 46007088 |
| chr22 | 46008209 | 46009545 |
| chr22 | 46051158 | 46052466 |
| chr22 | 46053600 | 46054209 |
| chr22 | 46092576 | 46093100 |
| chr22 | 46114165 | 46115257 |
| chr22 | 46121998 | 46122669 |
| chr22 | 46223878 | 46224577 |
| chr22 | 46267500 | 46267910 |
| chr22 | 48639086 | 48639692 |
| chr4 | 42590721 | 42590957 |
| chr4 | 53347797 | 53347952 |
| chr4 | 53377579 | 53378044 |
| chr4 | 53377580 | 53378040 |
| chr4 | 53377585 | 53378050 |
| chr4 | 53814347 | 53814952 |
| chr4 | 53907355 | 53908790 |
| chr4 | 54064464 | 54064629 |
| chr4 | 54091962 | 54092343 |
| chr4 | 54106070 | 54294081 |
| chr4 | 54149233 | 54363317 |
| chr4 | 54222805 | 54224049 |
| chr4 | 54226675 | 54227227 |
| chr4 | 54227466 | 54227931 |
| chr4 | 54227786 | 54228468 |
| chr4 | 54229320 | 54230209 |
| chr4 | 54229770 | 54231241 |
| chr4 | 54229943 | 54230726 |
| chr4 | 54230225 | 54230722 |
| chr4 | 54230229 | 54230721 |
| chr4 | 54230262 | 54230917 |
| chr4 | 54230921 | 54231996 |
| chr4 | 54230960 | 54231953 |
| chr4 | 54230971 | 54231909 |
| chr4 | 54231000 | 54231661 |
| chr4 | 54231419 | 54233246 |
| chr4 | 54232225 | 54233168 |
| chr4 | 54232950 | 54233688 |
| chr4 | 54233178 | 54233596 |
| chr4 | 54233313 | 54233539 |
| chr4 | 54233328 | 54234186 |
| chr4 | 54233433 | 54233943 |
| chr4 | 54233436 | 54233953 |
| chr4 | 54233514 | 54234308 |
| chr4 | 54233526 | 54234320 |
| chr4 | 54233528 | 54234306 |
| chr4 | 121485093 | 121485837 |
| chr4 | 121801326 | 121801877 |
| chr6 | 1963574 | 1963787 |
| chr6 | 2765552 | 2766281 |
| chr6 | 2998547 | 2999693 |
| chr6 | 3068566 | 3069012 |
| chr6 | 3157702 | 3158207 |
| chr6 | 3226300 | 3226990 |
| chr6 | 3227946 | 3228352 |
| chr6 | 3258796 | 3259407 |
| chr6 | 3750189 | 3750672 |
| chr6 | 4135856 | 4136240 |
| chr6 | 4879536 | 31830200 |
| chr6 | 6006171 | 6006913 |
| chr6 | 7107766 | 7108289 |
| chr6 | 8589908 | 37705558 |
| chr6 | 11829807 | 11830447 |
| chr6 | 12011735 | 12012189 |
| chr6 | 13303056 | 13303955 |
| chr6 | 13328293 | 13328915 |
| chr6 | 13454836 | 13455845 |
| chr6 | 13455085 | 13455739 |
| chr6 | 13486750 | 13487272 |
| chr6 | 17206414 | 28219012 |
| chr6 | 18939907 | 22260357 |
| chr6 | 19837326 | 19837856 |
| chr6 | 20401791 | 20402701 |
| chr6 | 20402570 | 20403370 |
| chr6 | 20402771 | 20403536 |
| chr6 | 25234798 | 25235009 |
| chr6 | 26204047 | 26204509 |
| chr6 | 26215444 | 26216398 |
| chr6 | 26250017 | 26250540 |
| chr6 | 26596146 | 26596990 |
| chr6 | 27547704 | 27547777 |
| chr6 | 27791525 | 27792022 |
| chr6 | 37697031 | 37697396 |
| chr6 | 37698513 | 37699144 |
| chr6 | 45421718 | 45422060 |
| chr6 | 147507945 | 147508574 |
| chr7 | 1027417 | 1028170 |
| chr7 | 1028745 | 1028982 |
| chr7 | 1084226 | 1084908 |
| chr7 | 1887549 | 1887871 |
| chr7 | 3104818 | 3105037 |
| chr7 | 6196422 | 12703520 |
| chr7 | 7182582 | 7183375 |
| chr7 | 12633550 | 12633931 |
| chr7 | 18795239 | 47850679 |
| chr7 | 21057116 | 21057504 |
| chr7 | 21427239 | 21427909 |
| chr7 | 24366262 | 24366476 |
| chr7 | 25372256 | 25372508 |
| chr7 | 26922489 | 26922709 |
| chr7 | 29468136 | 75878934 |
| chr7 | 30202937 | 30203160 |
| chr7 | 37448569 | 37449073 |
| chr7 | 37594938 | 37595333 |
| chr7 | 43094291 | 43094676 |
| chr7 | 43198594 | 55095878 |
| chr7 | 43583079 | 43583681 |
| chr7 | 43583089 | 43583551 |
| chr7 | 47239505 | 47239700 |
| chr7 | 47581673 | 47581954 |
| chr7 | 53295842 | 102969981 |
| chr7 | 54985672 | 54986034 |
| chr7 | 66227004 | 100121157 |
| chr7 | 76998862 | 76999020 |
| chr7 | 77854449 | 77855208 |
| chr7 | 80303614 | 80304606 |
| chr7 | 80469719 | 80470103 |
| chr7 | 82522987 | 102010434 |
| chr7 | 83770949 | 83771664 |
| chr7 | 84603803 | 84701767 |
| chr7 | 89301767 | 89301845 |
| chr7 | 92134066 | 92134983 |
| chr7 | 92833009 | 92833307 |
| chr7 | 93707490 | 93707877 |
| chr7 | 95893641 | 95894013 |
| chr7 | 100678303 | 100678977 |
| chr7 | 101159943 | 151098370 |
| chr7 | 101789613 | 101790209 |
| chr7 | 102464887 | 102465368 |
| chr7 | 103295864 | 103297039 |
| chr7 | 104713587 | 104713934 |
| chr7 | 105792015 | 105792368 |
| chr7 | 107961212 | 107961600 |
| chr7 | 110933819 | 137072025 |
| chr7 | 111873996 | 111874269 |
| chr7 | 115144752 | 115145169 |
| chr7 | 115367187 | 115367624 |
| chr7 | 116674913 | 121917354 |
| chr7 | 116862628 | 140640933 |
| chr7 | 120274022 | 120274701 |
| chr7 | 120857619 | 135168315 |
| chr7 | 121899118 | 121899693 |
| chr7 | 122849986 | 122850376 |
| chr7 | 122886156 | 122886840 |
| chr7 | 128032229 | 128032582 |
| chr7 | 129156226 | 129594545 |
| chr7 | 132317781 | 132318497 |
| chr7 | 135144930 | 138169113 |
| chr7 | 137515860 | 137672617 |
| chr7 | 138891189 | 138891500 |
| chr7 | 139036196 | 139036796 |
| chr7 | 140696626 | 140697350 |
| chr7 | 149623685 | 149624410 |
| chr7 | 149881972 | 149882712 |
| chr7 | 150902493 | 150903084 |
| chr7 | 152829518 | 152830349 |
| chr7 | 152951425 | 152951618 |
| chr7 | 155482115 | 155482690 |
| chr7 | 156601658 | 156601859 |
| chr7 | 157676552 | 157677126 |
| chr7 | 157689623 | 157690069 |
| chr7 | 158387515 | 158387575 |
| chr8 | 47744742 | 47745338 |
| chr8 | 47865086 | 47865295 |
| chr8 | 80040901 | 80043224 |
| chr8 | 80578459 | 80578765 |
| chr8 | 94895218 | 94895737 |
| chr8 | 94895218 | 94895747 |
| chr8 | 94895255 | 94895731 |
| chr8 | 94951639 | 94952202 |
| chr8 | 95133566 | 95134143 |
| chr8 | 96161482 | 96162547 |
| chr8 | 97644502 | 97645005 |
| chr8 | 100244374 | 100245036 |
| chr8 | 100721642 | 100722256 |
| chr8 | 100950593 | 100951363 |
| chr8 | 102239040 | 102239619 |
| chr8 | 102410735 | 102411574 |
| chr8 | 102654515 | 102655665 |
| chr8 | 102654770 | 102655674 |
| chr8 | 102655733 | 102656138 |
| chr8 | 102806185 | 102806779 |
| chr8 | 103499902 | 103500296 |
| chr8 | 103500801 | 103501474 |
| chr8 | 108977521 | 108978688 |
| chr8 | 109333663 | 109334253 |
| chr8 | 109539825 | 109540079 |
| chr8 | 114456278 | 114457554 |
| chr8 | 115536468 | 115537073 |
| chr8 | 115930683 | 142497631 |
| chr8 | 117121187 | 117122030 |
| chr8 | 122861063 | 122862899 |
| chr8 | 123273404 | 123274098 |
| chr8 | 123273854 | 123274736 |
| chr8 | 123274336 | 123274746 |
| chr8 | 123768036 | 123768383 |
| chr8 | 123949572 | 131282269 |
| chr8 | 124728160 | 124728489 |
| chr8 | 124915882 | 124916823 |
| chr8 | 125334526 | 125335491 |
| chr8 | 125432345 | 125433200 |
| chr8 | 126558355 | 126558639 |
| chr8 | 127736221 | 127736859 |
| chr8 | 127737027 | 127737842 |
| chr8 | 129918116 | 129918703 |
| chr8 | 131648667 | 131649912 |
| chr8 | 132079147 | 132080026 |
| chr9 | 14007444 | 14314053 |
| chr9 | 14303680 | 14304490 |
| chr9 | 16710713 | 16711151 |
| chr9 | 16993492 | 16993728 |

TABLE 9

Co-ordinates of circle identified (Junction tag >1) in GBM cell lines

| Chromosome | Start | End |
|---|---|---|
| chr1 | 32500550 | 32539743 |
| chr1 | 32500565 | 32539742 |
| chr1 | 235078245 | 235078548 |
| chr10 | 130300872 | 130301711 |
| chr11 | 3257642 | 3303607 |
| chr11 | 69917483 | 69917610 |
| chr11 | 70371325 | 70371556 |
| chr12 | 130043305 | 130043472 |
| chr13 | 101820638 | 101820755 |
| chr14 | 39033513 | 39033641 |
| chr17 | 41632758 | 41633279 |
| chr17 | 80024304 | 80024653 |
| chr17 | 80497980 | 80498098 |
| chr17 | 82898940 | 82899120 |
| chr18 | 9809076 | 9809266 |
| chr19 | 310547 | 310663 |
| chr19 | 310597 | 310837 |
| chr19 | 5761463 | 5761618 |
| chr19 | 49867633 | 49867701 |
| chr2 | 3046153 | 3046312 |
| chr2 | 55048772 | 55204950 |
| chr2 | 216766042 | 216766166 |
| chr20 | 31060443 | 31064213 |
| chr20 | 63158461 | 63158602 |
| chr20 | 63626185 | 63626527 |
| chr21 | 37806440 | 37806837 |
| chr21 | 46645209 | 46645315 |
| chr22 | 47549004 | 47549110 |
| chr22 | 49973631 | 49973803 |
| chr3 | 93470432 | 93470782 |
| chr3 | 93470451 | 93470644 |
| chr3 | 194822580 | 194825701 |
| chr4 | 41216413 | 86934989 |
| chr4 | 59802691 | 59803100 |
| chr4 | 118591708 | 119454712 |
| chr4 | 133845222 | 133845431 |
| chr5 | 117973459 | 117973635 |
| chr6 | 18155080 | 18155232 |
| chr6 | 18155085 | 18155223 |
| chr6 | 44044545 | 44045272 |
| chr6 | 54059859 | 54063910 |
| chr7 | 47669121 | 47669934 |
| chr7 | 54590796 | 55256528 |
| chr7 | 54771165 | 54782815 |
| chr7 | 65038261 | 65873269 |
| chr7 | 65038264 | 65873256 |
| chr7 | 76498794 | 76998017 |
| chr7 | 76498805 | 76998018 |
| chr7 | 98547916 | 98548526 |
| chr7 | 157480227 | 157480519 |
| chr8 | 138691547 | 138692217 |
| chr9 | 89254202 | 96157888 |
| chr9 | 127802760 | 127802926 |
| chr9 | 134376587 | 134376652 |
| chrX | 7515541 | 7515675 |
| chrX | 153382567 | 153383002 |
| chrY | 10945179 | 11295108 |
| chrY | 10962886 | 11294341 |

### Discussion of Examples 1-8

[0202] It is demonstrated herein that the application of the Circle_finder algorithm (see, e.g., Table 11) to ATAC-seq data can identify eccDNA in cell lines and tissues. Most of the eccDNA thus identified in the cell line could be detected by inverse PCR on DNA enriched for extrachromosomal DNA with disenrichment of linear DNA fragments. The metaphase spreads from OVCAR8 cells showed the presence of these eccDNA loci as a signal off the chromosomes, consistent with the loci being extrachromosomal. Even if ATAC-seq is performed without experimentally dis-enriching linear chromosomal DNA and/or enriching circular DNA, this approach is useful to identify loci that are either contained in eccDNAs or have suffered a tandem segmental duplication in the chromosome. The identification of eccDNA/duplication in the EGFR locus in GBM cell lines as well as GBMs suggested that existing ATAC-seq data from other cancers should also be examined closely to find the driver gene amplification on eccDNA/duplication events in each tumor type. Indeed, several cancer driver genes were found located in such loci (Table 3). These results suggest that deeper sequencing of tumors by ATAC-seq with longer paired-end-reads will identify many more clinically important sites involved in eccDNA/duplication in these tumors.

[0203] Chromosome ends are protected by telomeres. Once the chromosome suffers a catastrophic fragmentation, as in chromothripsis, some parts of the chromosome may be protected from degradation by eccDNA formation. EccDNA can also be generated from extra linear DNA produced by some kind of copying mechanism as a byproduct of DNA replication or repair. Either way, the present results show that eccDNA are very prevalent in cancer cell lines and tumors, and that ATAC-seq is an effective method to identify such eccDNA.

[0204] It has been reported that eccDNA longer than a few kb may have origins of replication and may get amplified independent of the main chromosome. Thus, if an eccDNA harbors an oncogene, then amplification of such eccDNA in tumor cells will increase the fitness of the tumor cell. In addition, since a centromere is absent in the eccDNA (Turner et al., Nature 543, 122-125 (2017)), eccDNA may segregate unevenly between daughter cells and result in tumor heterogeneity (deCarvalho et al., Nat Genet 50, 708-717 (2018)). Both these mechanisms will increase the likelihood that if a particular type of therapy inhibits a gene resident on a pre-existing eccDNA, then the tumor is likely to acquire resistance through the selective amplification of that eccDNA.

[0205] In this context it is particularly exciting that circle (or gene-duplication) at an important locus in a subset of the tumor cells is identified by ATAC-seq even before the amplification is apparent by a CNV analysis of the whole tumor (FIG. 4D). To estimate whether ATAC-seq can identify loci in early, somatically mosaic states of amplification as eccDNA/segmental duplication, the amplicons identified by TCGA from gene array hybridization were analyzed. It is apparent that an amplicon has to be at least around 1.5 MB long to be detected as a single copy amplification by gene microarrays (3 copies per cell) (Materials and Methods for Examples 1-8 and FIG. 7). In contrast, somatically mosaic increase in copy number of loci far smaller than that length was detected by use of Circle_finder on ATAC-seq or WGS data. For example, Circle_finder on ATAC-seq data identifies sites of incipient amplification of the EGFR gene in a subset of tumor cells even before such amplification is detected by copy number measurements, predicting that even if the tumor responds to anti-EGF therapy, it is likely to recur because of amplification of the EGFR gene.

[0206] Many of the abundant eccDNA loci intersect with unprocessed pseudogenes, which are known to have introns and regulatory sequences, but crippled by stop codons in the open reading frames (Tutar, Comp Funct Genomics 2012, 424526 (2012)). Since eccDNA evolve and pick up substitution, insertion and deletion mutations (Turner et al., Nature 543, 122-125 (2017); Xu et al., Acta Neuropathol 137, 123-137 (2019)), it is tempting to speculate that amplification of unprocessed pseudogenes on eccDNA and their evolution may make these genes translationally competent to give an unknown advantage during tumorigenesis.

[0207] Finally, it is noted that a large fraction of eccDNA identified by ATAC-seq have properties similar to the microDNA reported earlier: length <1 kb, with peaks at 180 and 380 bases, high GC content, enrichment of their sites of origin in regions upstream of genes and in CpG islands and the presence of short sequences of homology flanking the chromosomal locus giving rise to the circle. The small size of these circles has thus been confirmed by rolling circle amplification (Shibata et al., Science 336, 82-86 (2012)), electron microscopy (Shibata et al., Science 336, 82-86 (2012)) and now by ATAC-seq, ruling out any possibility that the previously reported small size was due to preferential amplification of small circles. Although eccDNA longer than 2 kb were observed in mouse somatic tissue but the majority (>90%) of eccDNA were shorter than 2 kb (Dillon et al., Cell Rep 11, 1749-1759 (2015); Shibata et al., Science 336, 82-86 (2012)). Turner et al. (Turner et al., Nature 543, 122-125 (2017)) & deCarvalho et al. (deCarvalho et al., Nat Genet 50, 708-717 (2018)) have identified long circles of DNA in cancers, called ecDNA. It is believed that the long circles identified in tumors by ATAC-Seq, e.g. the one containing the EGFR gene, belong to this latter class of circles. The consistent properties of the small circles suggest that common mechanisms are involved in their generation in cell lines and in tumors, although it is unclear whether exactly the same mechanisms are involved in producing the longer circles seen in ecDNAs that give rise to clinically significant gene amplifications.

### Materials and Methods for Examples 1-8

[0208] ATAC-seq library preparation. ATAC-seq for cell lines was performed as per the OMNI-ATAC-seq protocol (Corces et al., Nat Methods 14, 959-962 (2017)). Briefly, C4-2 and OVCAR8 cells were grown in RPMI-1640 (Corning #10-040) supplemented with 10% FBS to about 80% confluence. 50,000 viable cells were lysed in 10 mM Tris-HCl (pH 7.4), 10 mM NaCl, 3 mM MgCl2 and 0.1% Tween-20. Nuclear pellet was then subjected to transposition reaction using Nextera DNA Sample Preparation kit (Illumina #FC-121-1030) in the presence of 0.01% digitonin and 0.1% Tween-20 at 37° C. for 30 minutes and cleaned up with DNA Clean and Concentrator-5 Kit (Zymo #D4014). For qPCR, 3 to 6 additional cycles of PCR amplification was performed using NEBNext High-Fidelity 2X PCR Master Mix (NEB #M0541L) and Nextera Index Kit (Illumina #15055289). Cleaned up libraries were quantified and pooled for sequencing by Novogene.

[0209] Identification of eccDNA from ATAC-seq and WGS libraries. Paired end reads were mapped to the hg38 genome build using bwa-mem (Li & Durbin, Bioinformatics 25,1754-1760 (2009)) with default setting. The split reads (reads not mapped in contiguous manner) were collected using tool samblaster ( Faust & Hall, Bioinformatics 30, 2503-2505 (2014)). If one tag of a paired read is mapped contiguously (one entry in mapped file) and other tag is mapped in a split manner (two entries in mapped file) then the particular read id will have three entries in alignment file. Therefore, all the read pair IDs that mapped to three unique sites in the genome from the alignment file were collected. Next, split reads that mapped uniquely at two positions on the same chromosome and in the same orientation were collected. Returning to the list of paired end IDs that mapped uniquely to three sites in the genome, paired end IDs were identified where the contiguously mapped read is between the two split reads and on the opposite strand. From this list a circle is annotated if at least one junctional sequence was found. For karyotype and box plot at least two junctional reads were considered.

[0210] Copy number amplification (CNA) Analysis. For each identified eccDNA (JTGE2) an upstream and downstream genomic interval of equivalent length was created. Next, the number of reads that mapped to each of the three intervals (upstream, eccDNA and downstream) were counted. Finally, CNA was computed by counting the number of mapped read in eccDNA interval divided by mean of the number of reads in upstream and downstream intervals. CNA value more than 1 would suggest the amplification of the locus defined by the eccDNA.

[0211] EccDNA isolation. EccDNA for FIG. 3 was prepared from the human cancer cell lines. The cells were grown on 150 mm plates until reaching confluence. Approximately 4e7 cells were isolated per sample. The cells were trypsinized and then spun down at 300 g. The cells were washed with PBS, spun down at 300 g and resuspended in 6 mL of re-suspension buffer (P1) of the Qiagen HiSpeed Plasmid MidiKit (catalog 12643). 6 mL lysis buffer (P2) was added according to manufacturer’s instructions. The cells were lysed for 5 minutes and before adding the neutralization buffer (P3), and incubation at room temperature for 10 minutes. The cell lysate was passed through the QIAfilter cartridge. 4 mL of equilibration buffer (QBT) was added to the HiSpeed Tip and allowed to pass through the resin. The lysate was added to the HiSpeed Tip and then the HiSpeed Tip was washed with 20 mL of washing buffer (QC). Then the DNA was eluted from the HiSpeed Tip with 5 mL of elution buffer (QF) and precipitated with 3.5 mL of isopropanol and incubation at room temperature for 5 minutes. The DNA was passed through a QIAprecipitator, which was washed with 2 mL of 70% ethanol. The excess ethanol was removed by passing air through the QIAprecipitator five times. The DNA was precipitated from the QIAprecipitator by 1 mL of TE buffer and quantified using a nanodrop spectrophotometer. The DNA eluted from the QIAprecipitator was then precipitated again by the addition of 2 mL of ethanol and 1 ug of glycogen and centrifugation at 15,000 g. The supernatant was removed, the DNA was air dried for 5 minutes, re-suspended in 20 uL of TE and warmed to 37° C. for 5 minutes. Then the DNA was digested with the Lucigen ATP-dependent plasmid safe DNase (catalog E3101K). The 10X buffer and ATP was added according to manufacturer’s recommendations. Additionally, RNAse A was added to the solution to digest RNA concurrently with the linear DNA. The sample was digested overnight and then purified using a Zymo PCR purification kit (catalog D4003). Briefly, the DNA binding buffer was added to the DNA solution in a 5:1 ratio. The mixture was then added to a Zymo-Spin column in a collection tube. The sample was centrifuged for 30 seconds at 10,000 g. Then the column was washed with 200 uL of DNA wash buffer and centrifuged for 30 seconds at 10,000 g. The wash step was repeated. The DNA was eluted by adding 50 uL of DNA elution buffer and centrifuging for 30 seconds at 10,000 g. The DNA was quantified by a nanodrop spectrophotometer to ensure digestion of the linear DNA and then the DNA digestion, purification, and quantification steps repeated until the DNA concentration no longer decreased after digestion. Together, this process helped ensure that the digestion of linear DNA was complete. These methods are comparable to the methods previously used where the loss of linear DNA was validated by quantifying the loss of linear DNA with QPCR compared to circular DNA. EM imaging in those experiments showed that the linear DNA was no longer present in the samples (Dillon et al., Cell Rep 11, 1749-1759 (2015); Shibata et al., Science 336, 82-86 (2012)).

[0212] Outward directed PCRs (inverse PCR) for detection of eccDNA. Outward directed primers were designed across the junctional tags identified from ATAC-seq analysis. PCR was done with Phusion High-Fidelity DNA polymerase (NEB) according to manufacturer’s instructions. 3 ng of purified circular DNA was used as template. Unless otherwise stated, all the computation and plots were made of eccDNA present on chr1-22, chrX & chrY.

[0213] Metaphase Fluorescence in-situ hybridization (Metaphase FISH). OVCAR8 cells were cultured in RPMI medium supplemented with 10% FBS and 1% penicillin/streptomycin in presence of 5% C02 in humidified incubator at 37° C. Cells were treated with 2 mM thymidine for 16 hours and released for 9 hours in regular medium followed by another block with 2 mM thymidine to arrest the cells at G1/S boundary. The cells were released from the double-thymidine block for 3 hours in regular medium and 9 hours in 0.1 µg/ml Colcemid. Mitotic cells were shaken off, washed twice with 1X PBS and resuspended in 75 mM KCl for 30 min at 370° C. The cells were centrifuged at 300 Xg for 5 min, fixed with Carnoy’s fixative (3:1 methanol:glacial acetic acid, v/v) on ice for 30 min, washed twice with fixative and metaphase spreads were prepared. The glass slides containing metaphase spreads were immersed in pre-warmed denaturation buffer (70% formamide, 2X SSC, pH 7.0) at 73° C. for 5 min and slides were serially dehydrated with ethanol (70%, 85%, 100%) for 2 min each and dried at room temperature until all the ethanol evaporated. The FISH probes (Empire Genomics) were denatured with hybridization buffer at 730° C. for 5 min and immediately chilled on ice for 2 min. The probe mixture was added onto the slide and coverslips were applied onto the slide and sealed with rubber cement and incubated at 370° C. for overnight in humidified chamber. The coverslips were removed and slides were washed with pre-warmed 0.4X SSC containing 0.3% NP-40 at 73° C. for 2 min followed by washing with 2X SCC buffer containing 0.1% NP-40 at room temperature for 5 min. The slides were dried at room and mounted with Vectashield DAPI medium.

[0214] List of TCGA ID that was used for LGG and GBM data analysis. LGG: TCGA-P5-A77X-01A, TCGA-DU-5870-02A, TCGA-DB-A75K-01A, TCGA-W9-A837-01A, TCGA-F6-A8O3-01A, TCGA-FG-A4MY-01A, TCGA-E1-A7YI-01A, TCGA-P5-A735-01A, TCGA-DU-6407-02B. GBM: TCGA-06-A7TK-01A, TCGA-4W-AA9S-01A, TCGA-OX-A56R-01A, TCGA-76-6656-01A, TCGA-RR-A6KB-01A, TCGA-06-A6S1-01A, TCGA-06-A5U0-01A, TCGA-06-A7TL-01A.

[0215] Testing the limit of detection of gene amplification by CNV measurements. It was tested whether the detection of eccDNAs from ATAC-Seq data can identify somatically mosaic amplifications before they can be detected by copy number variation analyses from genotyping array data. To determine the sensitivity of detection of an amplicon by genotyping arrays, the previously released copy number variation (CNV) results generated by the TCGA research network were downloaded. The algorithm used by the TCGA research network segments the chromosomes into smaller sections where an amplification or deletion is detected. Empirically, the resulting length of segments with CNV determined by the algorithm are the result of (1) the true length of the amplified or deleted segment and (2) the extent to which the segment was amplified or deleted. While one cannot know whether or not a reported CNV-segment should have been further segmented, it was hypothesized that if ten segments with a similar level of amplification were analyzed, the smallest length among them approximates the smallest length that can be detected by the algorithm at that level of amplification, since the power to detect CNV changes increases as the extent of amplification increases. The TCGA research network reported amplifications as segment mean >0, where segment mean is ln(Copy number/2). All segments with segment mean >0.1 were ordered by reported segment mean values. Bins of ten segments were analyzed for the smallest segment in each bin. The median segment mean value of each bin (extent of amplification) is plotted against and the log-transformed smallest segment length in that bin (FIG. 7).

[0216] The correlation between the segment length and segment amplification can be modeled as a linear function with the following formula:

[0217] ln(Minimum Segment Length) = 15.8304 - 2.7475*Median Segment Mean

[0218] This relatively simple model captured the relationship between minimum segment length and the extent of amplification as measured by segment mean (Adjusted R2 = 0.5442, p<2.2E-16).

[0219] If one extra copy of an amplicon is present in every single cell of the sample, the segment mean value is 0.585 [log2(3/2)]. From the linear model in FIG. 7, the minimum segment length detectable at this segment mean value is 1.5 MB. Therefore, most of the somatically mosaic amplifications driven by most of the eccDNAs in the present study (median length - about 2 kb) will not be captured using genotyping arrays.

[0220] The number of ATAC-seq libraries analyzed in this study for various tumor type as follow: ACC 8; BLCA 10; BRCA 70; CESC 3; CHOL 1; COAD 38; ESCA 17; GBM 8; HNSC 9; KIRC 15; KIRP 29; LGG 10; LIHC 15; LUAD 21; LUSC 12; MESO 5; PCPG 9; PRAD 21; SKCM 9; STAD 19; TGCT 8; THCA 12; UCEC 10.

### Example 9

### Methods of Detecting MicroDNA

[0221] MicroDNA are extrachromosomal circles of DNA seen in normal cells and in cancers (Paulsen et al., Trends Genet. 2018;34(4):270-8). Because microDNA are closed circular DNA molecules, they have to be linearized to produce DNA fragments that can be sequenced. This can be done by rolling circle amplification with random hexamers (Shibata et al., Science. 2012;336(6077):82-6) or by digestion with restriction enzymes. Tagmentation (FIG. 1A), where a Tn5 transposase is used to break linear genomic DNA and add a transposase sequence to the ends of the DNA fragments, is used commonly to probe which parts of the genome are epigenetically open in ATAC-seq (Buenrostro et al., Curr Protoc Mol Biol. 2015;109:21 9 1-9). Transposase tagging breaks DNA and adds tags to end of DNA. ATAC-seq can be used to identify open chromatin at genome level. It uses Tn5, a hyperactive transposase to insert sequencing adapters into open area of chromatin regions.

[0222] This Example demonstrates that tagmentation also breaks circles efficiently to produce linear DNA fragments that can be sequenced by high throughput sequencing to identify the junctional sequences that are diagnostic of circles (FIGS. 1A and 1B). Once linearized, the DNA is subjected to paired-end sequencing. An algorithm, such as Circle Finder (https://github.com/pk7zuva/Circle_finder; see also Table 11), can then be used to identify circles, based on criteria, such as those indicated in FIG. 1B and FIG. 1C. By way of elaboration but not limitation, mapped-unmapped pairs of reads are looked for, where one read maps uniquely to the genome, but the other end is unmappable to the genome because it does not exist in the native genome. The algorithm then examines whether the unmappable read can be mapped by splitting read in to two (the differently shaded parts in the figure), where the two parts of the split read map to the genome on the “opposite strand” as to the mapped read, and flanking the mapped read. Since the paired-read sequencing is performed on DNA fragments of a defined length (usually 300-400 base), it is also ensured that at least one of the parts of the split read is <400 bases from the mapped read.

[0223] In FIG. 1A, transposase tagging (diamonds) are schematically showing, breaking circles of DNA. Subsequent ligation of adaptors (shaded bars), amplification, and sequencing identifies the junctional sequences (shaded fused bars) unique to each circle. In FIG. 1B, it is shown that the paired end reads obtained from high throughput sequencing identify the junction that is unique to circular DNA (but cannot be mapped to genomic DNA), linked to a tag that is uniquely mapped to the genome, at a specific sequence, in a specific orientation and a specific distance from the junction. The algorithm first identifies the junction sequence as a split read mapping to the genome to identify a potential circle. The second step checks the perfectly mapped end (the other end of the paired end read) maps at a specified distance from at least one of the two halves of the junction sequence. Finally, the perfectly mapped end has to map to DNA that is flanked by the sequences that make up the junction sequence. In addition, our algorithm also checks the polarity of paired reads mapped read should be on one strand, and the split reads of the junction sequence on the opposite strand.

[0224] To demonstrate that this approach identifies microDNA, ATAC-seq was performed using a NEXTERA™ kit (Illumina), and data was analyzed looking for circles. Hundreds of circles with the typical size distribution of >90% being less than 500 bases were found, with two peaks at 200 and 500 bases (FIGS. 6 and 7). ATAC-seq data from single cells (Chen et al., Nat Commun. 2018;9(1):5345) was turned to next and microDNA in five different cell types from two species (FIG. 8 and Table 10) were identified.

TABLE 10

Total number of microDNA per Cell in Various Cell Types

| Sample Name | # of Single Cell | Total Number of Unique |
|---|---|---|
| | | microDNA |
| Human | | |
| Fibroblast | 373 | 394,933 |
| Human | | |
| K562 Lymphoblast | 312 | 481,168 |
| Mouse | | |
| Cardiomaocyte | 740 | 1,218,751 |
| CD4 | 741 | 650,363 |

[0225] MicroDNA arise from epigenetically active parts of the genome, and since the epigenetically active parts of the genome are expected to be different in different cell types, it was hypothesized that the profile of the parts of the genome from which microDNA arise should be able to distinguish between cell types. TSNE plots (https://github.com/jkrijthe/Rtsne) of the microDNA genome-source profiles show that indeed the profiles can distinguish human fibroblasts from lymphoblasts or mouse cardiomyocytes from CD4+ T lymphocytes (FIG. 9).

[0226] In summary, standard tagmentation in ATAC-seq protocols can linearize circular DNA and identify microDNA in cell populations and in single cells. This simplifies the ability to identify microDNA and use the microDNA profiles to identify the tissue source of the microDNA for diagnosis. MicroDNA can be found as part of the circulating DNA in the blood. For example, circulating cell-free microDNA can be used for liquid biopsy as in screening of cancers and following the treatment response of cancers. MicroDNA circulating in the maternal blood can also be used for noninvasive prenatal testing of genetic disease in fetuses. Methods of detecting microDNA in accordance with the presently disclosed subject matter facilitate these applications.

### Example 10

### Screening Methods

[0227] Studies with eccDNAs on cancers in patients detect tumors poised to amplify a gene and acquire resistance. Also, methods for assessing circulating long eccDNAs in liquid biopsy provide for screening for cancers.

[0228] Referring to FIGS. 12 and 13, eccDNAs are detected pre-amplification in Patient 1 (lighter boxes, light blue when shown in color) and in Patient 2 (darker boxes, dark blue when shown in color) to avoid drugs to which the tumor will quickly become resistant by amplifying the drug-resistant gene. Particularly, in the left panel, a karyotype map prepared in accordance with the methods of the presently disclosed subject matter shows that somatically mosaic eccDNA with EGFR are detected to indicate a risk of pre-amplification of EGFR. Thus, a clinician should avoid anti-EGF therapy. In contrast, current methods as shown in the right panel only provide detection after amplification of resistance genes (see Zong et al., Science 2012 Dec 21;338(6114):1622-6).

[0229] Thus, the presently disclosed subject matter provides for the detection of drug resistance genes that are poised to amplify. Clinicians should avoid the corresponding drug for the clinical management of cancers, because the resistance gene will quickly amplify and make the cancer resistant to the drug. Thus, in accordance with the methods of the presently disclosed subject matter, single cell ATAC-seq provides for the study of cellular mosaicism of eccDNA in cancers and normal tissues.

[0230] Referring now to FIG. 14, cancers are different from normal cells in having long eccDNA. Also, cell-free eccDNAs are released into blood, including eccDNAs released from cancers into the circulation (Kumar et al., Mol. Cancer Res. 2017, 15:1197-1205; Sin et al., Proc Natl Acad Sci U S A. 2020;117:1658-1665). Thus, circulating cell-free long eccDNA is a biomarker for cancers (liquid biopsy) and eccDNA length can be detected using the presently disclosed method in a convenient and effective manner. Also, eccDNAs released from the fetus into maternal plasma can be used for noninvasive prenatal testing of genetic disease in fetuses. Methods of detecting microDNA in accordance with the presently disclosed subject matter facilitate these applications.

### Example 11

### Exonuclease Method and Kit

[0231] In some embodiments, a sample is treated with an exonuclease. Any suitable exonuclease as would be apparent to one of ordinary skill in the art may be used. The following EXAMPLE employs an exonuclease commercially available under the trademark PLASMID-SAFE™.

[0232] Isolate DNA from cells.

[0233] (a) Trypsinize cells (about 10 million to about 100 million cells) and centrifuge at 200 x g for 5 minutes at 25° C.

[0234] Discard the supernatant and wash cell pellet with 10 mL PBS 3 times.

[0235] Isolate DNA with HISPEED™ Plasmid Kits (Qiagen #12643)

[0236] (b) Purify circular DNA from contaminating linear DNA

[0237] Treat the crude DNA fraction (around 1 µg) with PLASMID-SAFE™ exonuclease (Lucigen #E3110K) to digest linear DNA.

[0238] Add the following to the reaction:
[0239] 10x PLASMID-SAFE™ Reaction Buffer 10 µL (final 1x)
[0240] 25 mM ATP 4 µL (final 1 mM)
[0241] 10 U/µL PLASMID-SAFE™ ATP-Dependent DNase 2 µL (final 20 units) nuclease-free water to 100 µL

[0242] Incubate the reaction at 37° C. for 5 days.

[0243] After each 24 hour incubation, add the following to each reaction to continue the enzymatic digestion:
[0244] 10x PLASMID-SAFE™ 10x Reaction Buffer 0.6 µL
[0245] 25 mM ATP 4 µL
[0246] 10 U/µL PLASMID-SAFE™ ATP-Dependent DNase 2 µL
[0247] Purify circular DNA with DNA Clean & Concentrator kit (Zymo Research #D4013)

Table 11

Scrip for Read Algorithm
#Arg1 = Number of processors
#Arg2 = Genome or index file “/hdata1/MICRODNA-HG38/hg38.fa”
#Arg3 = fastq file 1 “1E_S1_L1-L4 R1_001.fastq”
#Arg4 = fastq file 2 “1E_S1_L1-L4_R2_001.fastq”
#Arg5 = minNonOverlap between two split reads “10”
#Arg6 = Sample name “IE”
#Arg7 = genome build “hg38”
#Usage: bash “Number of processors” “/path-of-whole-genome-file/hg38.fa” “fastq file 1” “fastq file 2” “minNonOverlap between two split reads” “Sample name” “genome build”
#bash circle_finder-pipeline-bwa-mem-samblaster.sh 16 hg38.fa 1E_S1_L1-L4_Rl_001.fastq.75bp-R1.fastq 1E_S1_L1-L4_R2_001.fastq.75bp-R2.fastq 10 1E hg38

### Step 1: Mapping

[0248] bwa mem -t $1 $2 $3 $4 | samblaster -e --minNonOverlap $5 -d $6-$7\.disc.sam -s
$6-$7\.split.sam -u $6-$7\.unmap.sam > $6-$7\.sam

### Step 2: Converting (sam2bam), Sorting and Indexing Mapped Reads. Output of this Step is Input in Step 3

[0249] samtools view -@ $1 -bS $6-$7\.sam -o $6-$7\.bam
samtools sort -@ $1 -O bam -o $6-$7\.sorted.bam $6-$7\.bam
samtools index $6-$7\.sorted.bam
samtools view -@ $1 -bS $6-$7\.disc.sam > $6-$7\.disc.bam
samtools view -@ $1 -bS $6-$7\.split.sam > $6-$7\.split.bam
samtools view -@ $1 -bS $6-$7\.unmap.sam > $6-$7\.unmap.bam

### Step 3: Extract Concordant Pairs with Headers

[0250] samtools view -@ $1 -hf 0x2 $6-$7\.sorted.bam -bS > $6-$7\.concordant.bam

### Step 4: Converting Bam to Bed Format (Remember Bedtools Generate 0 Based Co-Ordinates)

[0251] bedtools bamtobed -cigar -i $6-$7\.split.bam | sed -e s/ _2\V2/\ 2/g | sed -e s/-1\V1/\
⅟g | awk '{printf ("%s\t%d\t%d\t%s\t%d\t%d\t%s\t%s\n",$1,$2,$3,$4,$5,$6,$7,$8)}' |
awk 'BEGIN{FS=OFS="\t"} {gsub("M", " M ", $8)} 1' | awk 'BEGIN{FS=OFS="\t"}
{gsub("S", " S ", $8)} 1' | awk'BEGIN{FS=OFS="\t"} {gsub("H", " H ", $8)} 1' | awk
'BEGIN{FS=OFS=" "} {if (($9=="M" && $NF=="H") || ($9=="M" && $NF=="S"))
{printf ("%s\tfirst\n",$0)} else if (($9=="S" && $NF=="M") || ($9=="H" &&
$NF=="M"))
{printf ("%s\tsecond\n",$0)} }' | awk'BEGIN{FS=OFS="\t"} {gsub("\ ", "", $8)} 1' > $6-
$7\.split.txt
bedtools bamtobed -cigar -i $6-$7\.concordant.bam | sed -e s/\V/\ /g | awk '{printf
("%s\t%d\t%d\t%s\t%d\t%d\t%s\t%s\n",$1,$2,$3,$4,$5,$6,$7,$8)}' > $6-
$7\.concordant.txt
bedtools bamtobed -cigar -i $6-$7\.disc.bam | sed -e s/\V/\ /g | awk '{printf
("%s\t%d\t%d\t%s\t%d\t%d\t%s\t%s\n",$1,$2,$3,$4,$5,$6,$7,$8)}' > $6-$7\.disc.txt

### Step 5: Calculating the Read-ID Frequency. The Frequency of 2 would Indicate that Particular Read is Uniquely Mapping in Genome and there are Only Two Split-Mapped Reads

[0252] awk '{print $4}' $6-$7\.split.txt | sort | uniq -c > $6-$7\.split.id-freq.txt
#This file "$6-$7\.split.id-freq.txt" will be used for collecting split id that have
frequency equal to 4.
awk '$1=="2" {print $2}' $6-$7\.split.id-freq.txt > $6-$7\.split.id-freq2.txt
awk '$1=="4" {print $2}' $6-$7\.split.id-freq.txt > $6-$7\.split.id-freq4.txt
awk '{print $4}' $6-$7\.concordant.txt | sort | uniq -c > $6-$7\.concordant.id-freq.txt
#The following command will chose (may not be always true) one concordant and 2
split read
awk '$1=="3" {print $2}' $6-$7\.concordant.id-freq.txt > $6-$7\.concordant.idfreq3.
txt
awk '$1>3 {print $2}' $6-$7\.concordant.id-freq.txt > $6-$7\.concordant.id-freqGr3.txt

### Step 6: Selecting Split Reads that were 1) Mapped Uniquely and 2) Mapped on More than One Loci. For Normal MicroDNA Identification no need to use the “freqGr2” File

[0253] grep -w -Ff $6-$7\.split.id-freq2.txt $6-$7\.split.txt > $6-$7\.split_freq2.txt
grep -w -Ff $6-$7\.split.id-freq4.txt $6-$7\.split.txt > $6-$7\.split_freq4.txt

[0254] #Selecting concordant pairs that were 1) mapped uniquely and 2) mapped on more than one loci (file “freqGr3.txt”)

grep -w -Ff $6-$7\.concordant.id-freq3.txt $6-$7\.concordant.txt > $6-
$7\.concordant_freq3.txt
grep -w -Ff $6-$7\.concordant.id-freqGr3.txt $6-$7\.concordant.txt > $6-
$7\.concordant_freqGr3.txt

### Step 7: Putting Split Read with Same ID in One Line

[0255] sed 'N;s/\n/\t/' $6-$7\.split_freq2.txt > $6-$7\.split_freq2.oneline.txt
sed 'N;s/\n/\t/' $6-$7\.split_freq4.txt > $6-$7\.split_freq4.oneline.txt

### Step 8: Split Reads Map on Same Chromosome and Map on Same Strand

[0256] Finally extracting id (split read same chromosome, split read same strand), collecting all the split reads that had quality >0

awk '$1==$10 && $7==$16 && $6>0 && $15>0 {print $4} ' $6-
$7\.split_freq2.oneline.txt > $6-$7\.split_freq2.oneline.S-R-S-CHR-S-ST.ID.txt

### Step 9: Based on Unique ID I am Extracting One Continuously Mapped Reads and Their Partner Mapped as Split Read (3 Lines for Each ID)

[0257] grep -w -Ff $6-$7\.split_freq2.oneline.S-R-S-CHR-S-ST.ID.txt $6-
$7\.concordant_freq3.txt > $6-$7\.concordant_freq3.2SPLIT-1M.txt

### Step 10: Sorting Based on Read-ID Followed by Length of Mapped Reads

[0258] awk 'BEGIN{FS=OFS="\t"} {gsub("M", " M ", $8)} 1' $6-
$7\.concordant_freq3.2SPLIT-1M.txt | awk'BEGIN{FS=OFS="\t"} {gsub("S", " S ",
$8)} 1' | awk 'BEGIN{FS=OFS="\t"} {gsub("H", " H ", $8)} 1' | awk
'BEGIN{FS=OFS=" "} {if (($9=="M" && $NF=="H") || ($9=="M" && $NF=="S"))
{printf ("%s\tfirst\n",$0)} else if (($9=="S" && $NF=="M") || ($9=="H" &&
$NF=="M"))
{printf ("%s\tsecond\n",$0)} else {printf ("%s\tconfusing\n",$0)}}' | awk
'BEGIN{FS=OFS="\t"} {gsub("\ ", "", $8)} 1' | awk'{printf ("%s\t%d\n",$0,($3-$2)+1)}'
| sort -k4,4 -k10,10n | sed 'N;N;s/\n/\t/g' | awk{if ($5==$15) {print $0} else if
(($5=="1" && $15=="2" && $25=="1") || ($5=="2" && $15=="1" && $25=="2"))
{printf
("%s\t%d\t%d\t%s\t%d\t%d\t%s\t%s\t%s\t%d\t%s\t%d\t%d\t%s\t%d\t%d\t%s\t%s\t%
s\t%d\t%s\t%d\t%d\t%s\t%d\t%d\t%s\t%s\t%s\t%d\n",
$1,$2,$3,$4,$5,$6,$7,$8,$9,$10,$21,$22,$23,$24,$25,$26,$27,$28,$29,$30,$11,$1
2,$13,$14,$15,$16,$17,$18,$19,$20)} else if (($5==" 1" && $15=="2" && $25=="2")
|| ($5=="2" && $15=="1" && $25==" 1")) {printf
("%s\t%d\t%d\t%s\t%d\t%d\t%s\t%s\t%s\t%d\t%s\t%d\t%d\t%s\t%d\t%d\t%s\t%s\t%
s\t%d\t%s\t%d\t%d\t%s\t%d\t%d\t%s\t%s\t%s\t%d\n",
$11,$12,$13,$14,$15,$16,$17,$18,$19,$20,$21,$22,$23,$24,$25,$26,$27,$28,$29,
$30,$1,$2,$3,$4,$5,$6,$7,$8,$9,$10)} }' > $6-$7\.concordant_freq3.2SPLIT-
1M.inoneline.txt

### Step 11: Unique Number of MicroDNA with Number of Split Reads

[0259] awk '$1==$11 && $1==$21 && $7==$17' $6-$7\.concordant_freq3.2SPLIT-
1M.inoneline.txt | awk '($7=="+" && $27=="-") || ($7=="-" && $27=="+")' | awk{if
($17=="+" && $19=="second" && $12<$2 && $22>=$12 && $23<=$3) {printf
("%s\t%d\t%d\n",$1,$12,$3)} else if ($7=="+" && $9=="second" && $2<$12 &&
$22>=$2 && $23<=$13) {printf ("%s\t%d\t%d\n",$1,$2,$13)} else if ($17=="-" &&
$19=="second" && $12<$2 && $22>=$12 && $23<=$3) {printf
("%s\t%d\t%d\n",$1,$12,$3)} else if ($7=="-" && $9=="second" && $2<$12 &&
$22>=$2 && $23<=$13) {printf ("%s\t%d\t%d\n",$1,$2,$13)} }' | sort | uniq -c | awk
'{printf ("%s\t%d\t%d\t%d\n",$2,$3,$4,$1)}' > $6-$7\.microDNA-JT.txt
rm *hg38.sam *hg38.bam

### REFERENCES

[0260] All references listed below, as well as all references cited in the instant disclosure, including but not limited to all patents, patent applications and publications thereof, scientific journal articles, and database entries (e.g., GENBANK® and UniProt biosequence database entries and all annotations available therein) are incorporated herein by reference in their entireties to the extent that they supplement, explain, provide a background for, or teach methodology, techniques, and/or compositions employed herein. Buenrostro et al., Curr Protoc Mol Biol 109, 21 29 21-29 (2015).

[0261] Corces et al., Science 362, (2018).

[0262] Dillon et al., Cell Rep 11, 1749-1759 (2015).

[0263] Kumar et al., Mol Cancer Res 15, 1197-1205 (2017).

[0264] Shibata et al., Science 336, 82-86 (2012).

[0265] Moller et al., G3 (Bethesda) 6, 453-462 (2015).

[0266] Moller et al., Proc Natl Acad Sci USA 112, E3114-3122 (2015).

[0267] Moller et al., Nat Commun 9, 1069 (2018).

[0268] deCarvalho et al., Nat Genet 50, 708-717 (2018).

[0269] Shoura et al., G3 (Bethesda) 7, 3295-3303 (2017).

[0270] Turner et al., Nature 543, 122-125 (2017).

[0271] Wu et al., Nature 575, 699-703 (2019).

[0272] Morton et al., Cell 179, 1330-1341 e1313 (2019).

[0273] Xie et al., Cell 175, 1228-1243 e1220 (2018).

[0274] Maher et al., Cell 148, 29-32 (2012).

[0275] Libermann et al., Nature 313, 144-147 (1985).

[0276] Maire et al., Neuro Oncol 16 Suppl 8, viii1-6 (2014).

[0277] Xu et al., Acta Neuropathol 137, 123-137 (2019).

[0278] Bailey et al., Cell 174, 1034-1035 (2018).

[0279] Tutar, Comp Funct Genomics 2012, 424526 (2012).

[0280] Corces et al., Nat Methods 14, 959-962 (2017).

[0281] Altschul et al. (1990a) J Mol Biol 215:403-410.

[0282] Altschul et al. (1990b) Proc Natl Acad Sci USA 87:14:5509-5513.

[0283] Altschul et al. (1997) Nucleic Acids Res 25:3389-3402.

[0284] Anders et al. (2014) Bioinformatics 31:166-169.

[0285] Ausubel et al. (1995) Current Protocols in Molecular Biology, Greene Publishing. Friedman et al. (2010) J Stat Softw 33:1-22.

[0286] Gait (1984) Oligonucleotide Synthesis: A Practical Approach, IRL Press, Oxford, England.

[0287] Gautier et al. (2004) Bioinformatics 20:307-315.

[0288] Glover (1985) DNA Cloning: a Practical Approach. Oxford Press, Oxford.

[0289] Gross & Mienhofer (eds.) (1981) The Peptides, Vol. 3. Academic Press, New York, New York, United States of America, pp. 3-88.

[0290] Harlow & Lane (1988) Antibodies, a Laboratory Manual, Cold Spring Harbor Laboratory Publications, Cold Spring Harbor, New York, United States of America.

[0291] Karlin & Altschul (1990) Proc Natl Acad Sci USA 87:2264-2268.

[0292] Karlin & Altschul (1993), Proc Natl Acad Sci USA 90:5873-5877.

[0293] Roe et al. (1996) DNA Isolation and Sequencing: Essential Techniques, John Wiley, New York, New York, United States of America.

[0294] Sambrook et al. (1989) Molecular Cloning: A Laboratory Manual, Cold Spring Harbor Laboratory Publications, Cold Spring Harbor, New York, United States of America.

[0295] Suykens & Vandewalle (1999) Neural Processing Letters 9:293-300.

[0296] U.S. Pat. Application Publication Nos. 2010/0120097; 2011/0189679; 2014/0113333; 2015/0307874; 2018/0064695; 2018/0169084; 2019/0030012; 2019/0282565; 2010/0120098, 2016/0060691, 2019/0032128.

[0297] U.S. Pat. Nos. 3,974,281; 5,800,992; 6,004,755; 6,013,449; 6,020,135; 6,033,860; 6,040,138; 6,177,248; 6,251,601; 6,309,822; 6,762,180; 7,824,856; 8,592,462; 9,884,802; 9,920,367; 10,028,966; 10,105,365; 10,227,584; each of which is incorporated by reference in its entirety.

[0298] While the presently disclosed subject matter has been disclosed with reference to specific embodiments, it is apparent that other embodiments and variations of the presently disclosed subject matter may be devised by others skilled in the art without departing from the true spirit and scope of the presently disclosed subject matter.

1. A method of detecting an extrachromosomal circular DNA (eccDNA) in a biological sample, the method comprising treating the biological sample to produce a tagged linearized fragment of genomic DNA; and determining whether the tagged linearized fragment is derived from an eccDNA to thereby detect the eccDNA.

2. The method of claim 1, wherein treating the biological sample to produce a tagged linearized fragment of genomic DNA comprises treating the biological sample with an insertional enzyme complex to produce a tagged linearized fragment of genomic DNA.

3. The method of claim 1 wherein determining whether the tagged linearized fragment is derived from an eccDNA comprises amplifying the tagged linearized fragment of genomic DNA.

4. The method of claim 1 wherein determining whether the tagged linearized fragment is derived from an eccDNA comprises sequencing the tagged linearized fragment of genomic DNA.

5. The method of claim 1 wherein determining whether the tagged linearized fragment is derived from an eccDNA comprises detecting a junctional sequence in the tagged linearized fragment.

6. The method of claim 5, wherein detecting a junctional sequence comprises employing read pairs.

7. The method of claim 1 further comprising treating the sample with an exonuclease prior to treating the biological sample to produce a tagged linearized fragment of genomic DNA, optionally treating the sample with an exonuclease prior to treating the biological sample with an insertional enzyme complex to produce a tagged linearized fragment enriched from eccDNA.

8. The method of claim 1 wherein the insertional enzyme complex comprises an insertional enzyme and at least two adaptors molecules.

9. The method of claim 2 wherein the insertional enzyme is a transposase.

10. The method of according to claim 9, wherein the transposase is a Tn5 transposase.

11. The method of claim 1 wherein the sample comprises a biopsy or a blood sample.

12. The method of claim 1, wherein the subject is a subject suffering from a cancer or suspected to be suffering from a cancer or a subject having a genetic disease or disorder or suspected to have a genetic disease or disorder,.

13. The method of claim 12, wherein the subject having a genetic disease or disorder or suspected to have a genetic disease or disorder is a fetus and the sample comprises a maternal blood sample.

14. A method, comprising analyzing a sample from a subject using the method of claim 1, to detect eccDNA; and providing a diagnosis or prognosis based on the detected eccDNA.

15. The method of claim 14, wherein providing a diagnosis or prognosis comprises identifying a cell type in the subject, identifying a cell population, identifying a tissue type, and/or identifying a nucleic acid sequence on the eccDNA.

16. The method of claim 14, further comprising choosing a therapy based on the diagnosis or prognosis, optionally based on the identified cell type, cell population, tissue type, or nucleic acid.

17. A method of detecting a cell type, a population of cells, or a tissue type in a subject, the method comprising:
(a) detecting an extrachromosomal circular DNA (eccDNA) in a biological sample from the subject by:
(i) treating the biological sample to produce a tagged linearized fragment of genomic DNA; and
(ii) determining whether the tagged linearized fragment is derived from an eccDNA to thereby detect the eccDNA; and
(b) determining a genomic region from which the eccDNA is derived to thereby detect a cell type, a population of cells or a tissue type in a subject.

18. A method of detecting a nucleic acid sequence associated with a condition in a subject, the method comprising:
(a) detecting an extrachromosomal circular DNA (eccDNA) in a sample from the subject by:
(i) treating the biological sample to produce a tagged linearized fragment, optionally enriched from eccDNA; and
(ii) determining whether the tagged linearized fragment is derived from an eccDNA to thereby detect the eccDNA; and
(b) detecting a presence of a nucleic acid sequence on the eccDNA, wherein the nucleic acid sequence is associated with a condition in the subject.

19. The method of claim 17, wherein treating the biological sample to produce a tagged linearized fragment, optionally enriched from genomic eccDNA, comprises treating the biological sample with an insertional enzyme complex to produce a tagged linearized fragment of genomic DNA, optionally treating the biological sample with an exonuclease to digest genomic linear DNA and then with an insertional enzyme complex to produce a tagged linearized fragment of genomic DNA.

20. The method of claim 17, wherein determining whether the tagged linearized fragment is derived from an eccDNA comprises amplifying the tagged linearized fragment of genomic DNA.

21. The method of claim 17, wherein determining whether the tagged linearized fragment is derived from an eccDNA comprises sequencing the tagged linearized fragment of genomic DNA.

22. The method of claim 17, wherein determining whether the tagged linearized fragment is derived from an eccDNA comprises detecting a junctional sequence in the tagged linearized fragment.

23. The method of claim 22, wherein detecting a junctional sequence comprises employing read pairs.

24. The method of claim 17, further comprising treating the sample with an exonuclease prior to treating the biological sample to produce a tagged linearized fragment of genomic DNA.

25. The method of claim 19, wherein the insertional enzyme complex comprises an insertional enzyme and at least two adaptors molecules.

26. The method of claim 19, wherein the insertional enzyme is a transposase.

27. The method of according to claim 26, wherein the transposase is a Tn5 transposase.

28. The method of claim 17, wherein the sample comprises a biopsy or a blood sample.

29. The method of claim 17, wherein the subject is a subject suffering from a cancer or suspected to be suffering from a cancer or a subject having a genetic disease or disorder or suspected to have a genetic disease or disorder.

30. The method of claim 29, wherein the subject having a genetic disease or disorder or suspected to have a genetic disease or disorder is a fetus and the sample comprises a maternal blood sample.

31. The method of claim 17, wherein identifying a cell type in the subject, identifying a cell population, identifying a tissue type; and/or identifying a nucleic acid sequence on the eccDNA further comprises identifying a cancer or a genetic disease or disorder in the subject.

32. The method of claim 17, further comprising choosing a therapy based on the identified cell type, cell population, tissue type, and/or nucleic acid sequence.

33. A kit for detecting eccDNA in a sample, wherein the kit comprises one or more reagents suitable for carrying out the method according to claim 1, and instructional material for employing the one or more reagents.

The application's sequence listing, which the Patent Office published only in electronic form, follows.

SEQUENCE LISTING (22 sequences)

SEQ ID NO: 1 - DNA, 30 bp, Artificial Sequence
  Junctional Sequence
caaccagcagcctgctgggtcaaaaccacc

SEQ ID NO: 2 - DNA, 30 bp, Artificial Sequence
  Junctional Sequence
tttttagtagagacgggaaagaaatcatcc

SEQ ID NO: 3 - DNA, 30 bp, Artificial Sequence
  Junctional sequence
tccccggctatgaaccactaaactcccaag

SEQ ID NO: 4 - DNA, 30 bp, Artificial Sequence
  Junctional sequence
tctcattatgcacttattttacaagccctg

SEQ ID NO: 5 - DNA, 30 bp, Artificial Sequence
  Junctional sequence
ctgcctcccaggggcagccagcagccctct

SEQ ID NO: 6 - DNA, 32 bp, Artificial Sequence
  Junctional sequence
tttctccctggaattgagagttgagaatagct

SEQ ID NO: 7 - DNA, 30 bp, Artificial Sequence
  Junctional sequence
ccgactgaactctacgtgcctggcctaatt

SEQ ID NO: 8 - DNA, 30 bp, Artificial Sequence
  Junctional sequence
ggggcctggcgcactagactcgcctgtcac

SEQ ID NO: 9 - DNA, 30 bp, Artificial Sequence
  Junctional sequence
agtttagccagtatactaagccgtaagtgt

SEQ ID NO: 10 - DNA, 30 bp, Artificial Sequence
  Junctional sequence
tttcagccaagcaaccaatattgctgtgtc

SEQ ID NO: 11 - DNA, 30 bp, Artificial Sequence
  Junctional sequence
gcattgactaagacgccatctcctgagctc

SEQ ID NO: 12 - DNA, 34208 bp, Homo sapiens
tgggtcaaaaccaccttgtttgatggcattttacgctgtaatgatgacatcttcgtatctgagatggaagccccccattgctctgctgtttacatgtttttgtctgctgtactagtgacctagtgctgcatagtcaactgcctgaaatccaatgtccttgaacagcacacacgcatggtcacacgcatcgtctctcagtttctcctcgggagcacgtgtgtggggtggctgcacctcaggatgtctcaggagggtcccatgaagtgctcagcccaactgcagtcatcggaagcctggcctggggcgggagggtctgcgggctgggactataggtgtgcaccgccactactcctggctaattgttgtgtttttagtagagatggggtttcactatgtcggccaggctgatctcaaactcctgacctcaggtgatccacccgcctcagcctcccaaagtgctgggattacaggcatgagccaccatgcccggcagaaattcaaaatcttcaagtgctgatcccatcagaaacgcccacaatataacaaggtgtgaggaaagggcgctgacccacacacgcaggcaggctcattttgacaacaggaaagagctggaagcatactaatggcaaatgatcttttactaatgacactttctgctttttatttttctgttttccaaaaggaacttgtgttatttttatcctcataaaaagaaacaagtggtgtatttttaaaaactgcgccactcagtagcaatctcttgatggaggatctgttttgcgcccccggtgttgagtttcccagactgacctgtcatctgaggtgctggggctccgagccccacgacggctgctgtgaggcctccacacttggcaagcagtgctgttccccgagcagagccagctccccgtgacagcagcctgtcatcagaatcccctgtcctcatttcctccagcccgagccaggactgcaaacaagggggacagtacggaaacccaacactctagcgcccaccccatagtggtcctggacacagcgagagttggggtcctccatgagggtcccccacacaacatgaggctgatgcccaaggctggggaaaaaccctgggacagtgtgggacacgagcaggggaaagagcaggagcaggggccaggctgggctgggctacggctgggctacggctggactatggctgagctgggctgggctatggctgggctatggctgggcaatagctgagctggactgggctatggctgggctatggttgggcaatagctgagctggactgggctatggctgggctatggttgggcaatagctgagctgggctgggctatggctgggctatggttgggcaatagctgagctgggctgagctatggctgggctatggctgggccaggctgggctgtagaggaagcatggactcagggaatctctatggaaggtaaccctaagggcaccttgcagacttggcagtaatttgtaggtgagcttcccctccataggctgtgtgcatctcaggaccaggagtggggttctgtctccctgggggccgcctggacctctctggtctgtaagagcattaggacaatccctagtagcatcaagaggccacagccagacccaatactccccagttcctccaggtcgcagcacacctggaaatggtcatactgctcaggcccacatggccgatgggtagagggctgagggctgagggcttctctcccatgcacctgaagtccctcagccacaaagctctgctctggtcactggtgtgagaaatgtccagtggcctcttgggtccccaactcaacccacctgaccttggtcagggcctgtggttctgagcccatttcagtcccaggcgtgagagcttccccctgcgactaccgtgaaccaagtgctggacgggaggctgatagtccactgctgtatttttaggtgaccctgtttcttagccgtcctgggcagccccgaggccaaggccatggggtagcagggcaaggagccccaagatctcccctatccacgctagctgggcggggcaactgagtgtggcacctcccctctctgggcaaagtttccctaccgccaccatggaccccaagctcggaaagcctctgctgaccaacctgtgcttattcatgataatcacgttttcccacgtgacaacagaacaagaggacacataggtgccgctgacatcaacagcgagggcagcacctgtcggtgtcctggccctgggctgagggtctctgtgaccccaggcccccaccacgggctccactgtactcaacttgtagacgaggaaacaggtggggaagctgcatccctgcccccaccagccagcccaaccgcgacagctttcacctgtccttgccctggagcccttcctgatgtctgtcctaggccacaagtccctggaaggcctcagtgggctttctgagctaacagtcaccaaggagccggcatctcactccttcccccaccagcccagccctcactgcctgaccctcccctcgccctgcagacagaggctaaaaataccctccccacgtggccaccagaccagccctgccccgccctgcaggcctccgtgtcccctggctgccggctaggcagtcctgctctctcgggtctgtgttctcagcttcgaggtccaggctgagtgagaggtaggatccagggggctctggggcaggggacagcagagagggcagggggaacccagccaggagcagcggggagggtgggttaggcccccgaggccagggatcacagcagggtgctttggagacgccccctggcccttgccagcggccaagccaggctcctcagggtgggggctcaggagacaggtttccctccatgtcccagccggagaggtgggagggggaggctgggccacccctcagatggcagccagggccactcagccacagtcgccagcctggctgggctcaggccttttgttgtcctgcccactcggcttcctcactccgggcctgggcaggcactggggtgaggctctgagaccctcaggaagccccgacccatgcagggactgcagggtgacaggtgtcagcaggcaccccgaggcccccaggggaagtgggggcgctcatgcgtgcctgcccatcgcccggcagcagctggcccaagggagcacaacaatgacgggaatgtgaggcctgcaggcggtggcccagggacagccctgtcacctactcaggccccagctcatctcccggctgcccagggagggcagagccgccttcaccggggccagcgcctcctggggaggggccaggcaggaaccccatgcatgcagtgttgggtgggtacttcgtgtaccggccgggatgctggggtgtggggccccggccacgtgagctgccctgtgcgcgagcccgggttggtccgcgaggccctgtgggctcccaggtgcttccccgctctggggtcaagaggtggcaccggggtcgggaagtcggggagccctagctcccatcgcctgcacctgtacctgcaccgtggctgcccgggccagattcttggcctcctggttctccagctgagctttgtcatttccatgcgtggcgttcccacgcattttgtacctgtggacgcgcggccgcctctcctgcccgggatggccccgcgaggcgccccctagcgggcgaacggcctctccgctgcgcagcctttcgccctggggtgacccgggtcgaaggcttgtgcacagacttgatctctcctagggatggttgtcttagggtgcgataccagaaggacataaaccacatgcacataattacatgagcctgaaagcggccttgctgacttcaaccatgcgggcgtggtgacgcgaaaccctccagaacgctgcctttggctggccgtttctgtttagcagcctccacccggccacgtggaatgcagggttcagagcctgggcccccaagcctagctctgagttcaaattccagctccaccacttcctaaatgtgtgatcttgggcaagtgactgaaaccttctgtgcctcagtctccccagctgtaaaagaggcaatgattgcacccaccctccaggactgttgtggggctgagtggtgaatgcacagcttctctgcatgcttggcacgtggcctggcacctgggagcaccgcgggagcaggagctgctgcagcccccaaatggcctccccagcaatgtgggatctgggacggaggacgcctcccgggagtttgggtgtctccggggtccctggggggtgggctcagtgtagcccagggttgcagatgacacccagggcatgggttcttttgccaaccctgttctgccctgaatgcctggccatgggtaggtctcccaccctctctgaacctcaatttcctcactgcaaatgggaatgacacctgccctaccttgcagggttctgggggtggcttgaggcagatggggggtaaagtgactggcatatggtcgatgcccatcctgtgtttatcaaggggtggaaagggctgatggacagaccgggtgggttgctcaggaggatgagaccatccccacttggctgaccctgctctcttctctcctaggagctcgggcggctccaggcacttcttcccttgagtgggtggactactgaggtcccctgggcacggcgtcatggtgcggaacgtggatgacctggatttccacctgccctcgcatgcccaggacatgctggatggcctgcagcgcctgcgctctcagcccaagctggccgacgtcacactgctggtgggcggccgggagctgccatgccaccgcggcctcctggcgctcagcagcccctacttccatgccatgtttgcgggtgacttcgccgagagcttctctgcgcgcgtggagctgcgggacgtggagcccgccgtggtgggacaactggtggacttcgtgtacacaggccggctgaccatcacgcagggcaacgtggaggcgctgacacgcacggctgcgcgcctgcacttcccctcggtgcagaaggtctgcggccgctacctgcagcagcaactggatgccgccaactgcctgggcatctgtgagttcggggagcagcaagggctgctgggcgtggctgccaaggcctgggccttcctgcgagagaactttgaggctgtggcacgtgaggacgagttcctgcagcttccccgagagcggctggtcacttgtctggccggcgacctgctgcaggtacagccggagcaaagccgactcgaggccctgatgcgctgggtgcgccatgacccgcaggcccgggccgcccacctgcccgagctgctcagcctagtgcacctggacgccgtgcccaggccctgcgtgcagcaactgctggcctcagagcccctgatccaggagtcagaggcatgccgggcagccctgtcccagggccatgatggggtgagtgagcggctgggaggccccatccctgggaagcagggaggagagccccagagaccccacctgagtagggacagagtaaggagtggacattccaaggtgcactctgaccttgccacgctccttgttttgggccagttccccatgaggacatcactattcagccctcaagtgcagatcatgcctctgtgtgtgtcacgccctgtgtgcaaggggcaggggaatgtggaagtggtaagatctggccctgtcctgaaggagcctgcagctcagtgggacaagcctggaaacagacctcaggcagtgtggaagggccaaatacatgcctaggacgcattctgggtgggctggcagtcaaggagggctctctggaggaggcagcatctgagctgggccttagaggagggataggagctcacaaggaggaaaagaggggaaaaccatccaggaaggaggtgcagcttgtgcacaggcaaggaggcacagacaggcctggcagtccgcctgagcttttatggggtgctacttcctgtttgtgctggcagtgtgcctggcaggcatggcaggtcatgatggaatgacaggtctgggagtggctgttcggtcagctgccgggcaccctgctcaggggccttgcttcggggcactcctttagagccaagtccggggacaaagagtggctcagactgatggtcctcaggccaagggtggagtgagtagtgggctaaaccctaacccctgtccccactggattccagccagtcacagagcgcccggcctcctgctggagctggcttcagagccttgcccgtggacggtcaccttgtattctaattcctggcagtgggagatctgggggttccatatggggggccagggtggatggctgtgggagagcctggggtcctgggagacctaggcagtgactgcttaccggccgttcctaagacagccagcatttcccactgagccgggacaccctcgtgccgcctgctggaggccacccagggagcaggggcagggagaagcttatgcgtggcgctgcggacctgctatgggatcggttctgaagatggttcaggaactccaggaatgcccctgaaaggcacatggtgcaaggagggagcagcttgtgcactcgggcacacgccatctccagcaacatgcaagcacacatgcactcacatgctgaggcctgcccaggacacgcgggggctcagggcatggggacacattgctgttgccctgaccctggcctcccaccccacaggcaccactcgccctccagcagaagctggaggaggtcctggtggtggtgggcgggcaggcgctggaggaggaggaggcaggtgaggagcccacccccggccttgggaactttgccttctacaacagcaaggccagtgagtacccctcccgcgtccagacccacctgctgtctctctgtcccagcgggagccgctgtgtcctccttgcaggtggagcgcatgaggctcgcagaggaccgggagctgtgtgaggcccctgtgaggggcgtgcctgggtgggcctcacctgggggctgcagaggagcccgaggtaccccgggagggggaaggctggcgggcactgctgctccctctccctgcagccggagcccaggactctggtcccttttaggccctggagccggtgtacaggcctccacggccaagactgcaccctgtggggtgggcggcctggccgctgcctcctccccatgctccctgctcagtgcacctgccgagggaatcgagaccccaaggggagagtggggtggggggtgaaggggtgcaggcagctggaggagcgagaactcagcttctgggtcagcccaaacggggttgtaatcccggacctcaaacaggtgacctcacctctctgagcctcagcttcctcatctgtgaaatgggctcctgctgcttcctcacacagttgtagggagccctgaagtgggcactgaggccaggtctgccatttggcgggaaaggaggcatgaggggccccgcagcggctctggaggccccctgcgctggccccaagaggtgctctggaaagggctgatgcaggctggctggtgtggggccaccaggcaggtcgccaaccatctccttggcgtcagcggctggcaggctccaggaagcctgaggccagctgttcgggtcaggggctgaagagagggggtttggggctgacatcaggagggagcagctgtctctcagacctggccgggaggtggggacgctggcaggaagagcctgttgacggctgggcaacccccaccctggggtgacagagccatgagtcatggggacacggtgcctgcccacagtgccaggctctgctcccagggaggcctggaattccgcatctcccaaaaatggtcataaatagtaaacagagtcttcctaggggacatcccaaaggcctgtgtctcttccacaaacatccaaaatatgtccatttataggactttaccatttccacatttattgtcttgattttccaaagcattttctcatctcttgcctcagtttacctcttgtagctccgagaggcaggcctgacttgggcacattgctctgccccacgaccctaggaacaataatcctaacagctgtcatcagctgagcagttctgtgaagtccccatagctcccgggaggctggggtcatccccattctacaacaaggaaactgaggctggggtttgcccacggacacacagctggggcaccacatctgagatttggacctgctctgcctgctgcaggtcctgatcccctgtatgtgcctggctgccaggagggcagggagggtgctcggaaggaaggaaggaaggaaggaaggaaggaaggaaggaaggaaggaaggaaggaaggaaggaaggcaggcaggcaggcaggcaggcaggcaggcaggcaggcaggcaggcaggcatgctgttggtgttatcacccactagtgacacccacagatcaggccacttaacccacaccgcatctaaccgacagaccagactcaggggctgaatggtccatttggggtcagtggggtcaactgcagggtcaaggtgagaccccggcctccaaaaccttgctgcttctccagggggctatcctgtgtccactctgagttccaggctctgcggagtgggtgggggagacacaatgagccagaagcacccaggaccccccgggcccccgtaccagtgtcaccctgcccctccctttccccaccagtgaggggggcatttctgcacccggtgcatggaaaggcacctgggaagggggagtggggaccaccccagcagggagcctggcagcctgacccttctgcctctctcttcctgccagagaggtggatggcacttccagacttccccgactatcacaagtggggtttctccctggcggccctgaacaacaacatctatgtcacaggtgggcagctcggggacccttccagagatgccctgcccagccaagcactgggctcagtgcaactccccgcactccgtggggtccctgagggttagtcaaggcttgccgaggcctttccatgcatgtgaaaacaaggacatttaaaatccgtggtcactcgtgggagctgggagccgcttctgtacacaggctagtgtgggcccacccctgcatcacacagctccttcaggtgaggctccaggcctcccgctgagtgccacgctggcgtggctgctgcaggccttcagcatggggtgccacgaggttgcaggcggcctccttcagcaggaagccccaggcctgggtggttgaccaggtgtctgtcttggtccccagaaagagtcgtgtgttgcaggggtcactttgctctttcctatctcagagattggggttccttgtaagatttgggaggggataagcttctgctgatgggggcttgaaaccaccgattttgtcgtccttgtttatggggatggagggacctgggcagtcacacagctcggctgcgctaccctggtcccacctctggctcaccacgttggagatcatggcctggcatgggaggaggtccctggacattggtatccacaccccatggcctggtgccccaggctggtggcacccatgtagacagaacttctcccggcaggtggctctcggggcacaaagacagacacctggtcaaccacccaggcctggtgcttccccctgaaggaggcctcctggaagcccgtggcgcccatgctgaagccccgcaccaaccacgccagcgcggccctcaatggggagatctacgttatcggcggtgaggccttcctctccacccttccctggggcctggttctagcctctcatccctgcagcaacaggaaccgagagccccatgctggcctcggagaccacggagatgccgctcccactgccaccctcagggctcgctgtctggtggggcgggcaagccacaggccagggctcctgaccaggcgggccatcaagacccacagcccaggtgtcctccctggccagctcccattgcctctgttgtgctgggacagcgacagcaagatggtgactcaggccccaggaggggttcctgcaggagcagccagtggggacggccacacccacccaccagcacctgcagctacagcaaggagtcacccaggagccgtcactgattaaaggaacatcgagaaacaaaatgtggccgggtgtggtggctcgctcctgtaatctcagcacttggcagggccaaggcaggaggactgcttggaggaggacagggtctctctatgttacccaggagtttgagactagcctgggcaacatagagagaccctgtctccctttttaaaattatttatttatttatgtattttttattttgttttttatttttgagacggtctttctctgtcacccaggctggagtgcagtggagtgatctcagctctctgcaacctccatcttccaggttcaagcaatcttcccacctcagcctcctgagtaggtaggaccccaggtgcatgccaccatgcccagataatttttgtattttctgtagtgatcggatttcaccatgttgtccaggctggtctcaaactcctgggctcaagtggtccacccgcctcagcctcccaaagtgctgggattacaagagggagccgctgcccccagcccataaaaaaataaaaaataaaaaaaaatagccaggccaggtgcagtggctcacacctgtaatctcagcactttgggaggctgaggcaggcggatcacgaggccaggagttcaagaccagcctggccaacatggtgaaaccccgtctctactaaaaatacaaaaattagctggacatgtaatcccagctacttgggaggccaaggcaggagaatcgtttgaaccctggaggcagaggttgcagtgagccgagatcaagccattacactgcagcctaggtgacagggtgagactccatctcaaaaaaaaaaaaaaaaaggcaggcatggtgtcacgtgccagccgaggtaggagtatcgctgagcctgagaggttgaggctgcaatgagctgtaatcgcaccactgcacttcagcctgggtgaccgagcaagaccctgtctcaaaaaaaaaaaaaagaaagaaaagaaaaacaaaacacatggggcccaaaagctctgtaggtgatgaactggtcttgaggccacttctaatgccccatctgtcccagctgtcccctttctctcagtggctaccgtgtccccaaccagagagcagaaagcacccagggctcccgagcccagggcttgtgaggtccccaggtgctcacagaggcccaggccagggcctgctctccccaggaggcgtccccatcactgccacacccagattgtatctgggactgggagggagctgcctacagctccagggtctcgcaacccgccctcccagggctggcatcctccattccagttcagagcaccccaggaaatgactcccagcacatgaggggcctgggggcgggcagcctcctgacagctccccgccaccccgttcccaaacatcagccccagctcgagctcaggagtggggcatttctaggcccgagtgtccacccccacccccaccacttcctggcggggcggccttgggaggtgccagcacctctcagaacctcagcttccctgtctgtgaaatggggagcccaccccacctcccaccactttgctgccttacaaagccccagcccctgagtttccaggcctcccctctcctccccagccctgaactgcccccgccctcaccccacaggcaccaccctggacgtggtggaggtggagagctatgacccctacacggacagctggacgcccgtcagcccggccctcaaatacgtcagcaacttctcggctgccggctgccggggccggctctacctggtgggctccagcgcctgcaagtacaacgccctggccctgcagtgctacaaccctgtcacaggtgggtggggctcagggaccgaggatagaggaccacaggcccctctgacaggcgacagtccgctcgtagtgatggtgaggattggggctcctgaggatagacggggcccggggtggagagagccggcggccgcaggcctctcacaaagaggaggggatgtggaggaaggcaggggcctaagaggtcagggacccactgcgtcagctccgcagagtcccagcacagaggcgagctgcacgtctgtcctgctcaggccttagggcagcagtgggctggggctgggggtgggggtggggtgccagtgatctgagcccagcacctggcagctgcctggctgttcttctacccaaaagggcctcacgggccgggagtggtgaccccgacctccgaggcctcgaggcccatcttgggctctggactctgtgccagagtttgaggcccagcgcagcctccctgagctctgagccgtccaccccgaccctggtctccagtcctgtttcaccctctggacagtgtagatggtggcgggccctgttctgaggcgtggatgtgaggacccttcaagagactgactgggcccagagtccaggcaaggcccacctgggtaccaggcccggggttgggggctgggcagggaggggcccccagcagtccccagtcagggtggggtgggtggggcggcagccaggccaaagcacccccaccacagggagagtcctgagggacccctgcaccctccacaggcccctcacctatgctgcagccttgtgaggggtcactgtccccagagggaaagatcgaggctgggtgagaggcaggtgtgggtccctcccagctgcaccgcagggacctactcccatttcacagacaggttcactgaggttcagagaggcactgagtccagggtccctcagagtggggcacagtgctagtgcccgctctggcaaccctggtgacggtggccagtgcccgtgccccccacagatgcgtggagtgtgatcgcctcgcccttcctgcccaagtacctgtcctcgcctcgctgtgctgcactgcacggggagctctacctcattggggacaacaccaagaaggtctacgtgtacgaccccggggccaacctgtggcagaaggtgggccgccccctcccccaacatgtgtgagcccctgcccaggactcctgacatcagagagccagcctgggaagtgagggatggggtgccacagagggcccactgcgaaggggacagcgcaggctggggtgcccacagagggcccacagtgaagggggtggcgcaggctggggtgcccacagagggcccacagtgaagagggtggcgcaggctggggtgcccacagagggcccacaatgaagggggtggtgcaggctggggtgcccacagagggcccacaataaagtgggtggcgcaggctgagatccccccaggctacaaggtgacaatagtgccctggcccgagtccccttgaggacaggggtgacggtgatggtgggagaacgcgatttgggttgccggccactggtgctctgtccctgcacacccagcttcctacagaggagtggcctgtcctccttctcagggagaaaagccaggttcagccggagggtactatagggaccaggagggagggcatcctctgccccagggtggccaagttggggagggggttcctgagctgagggtgaggtgagagccaccagcctgggggctttcctgttgtcctcagtgccatcccaccatggcccactctttgaccatcagtgcctgaggaaggggagggaggtgagcctctgggcggcctccctggtgaaggggacagtgcccaggaagttggggatgggtcctggcaccaagccagatgccctggacctgcccacctgccccaagactcccagtccctgcaggctgagaaggtggaactccttcctgcagcccccctgcaggctgctggcctggtgacagcaggacttctgcaatcctgctgcccacagctgtcccctggcgtcactgctcagctgacccagggcccccattacagcggtgagacaggtgcagggtgggccctgccaggctagcgtgtctgcctgggccctcccagctgggccacagccaggccttcctccagcccaggccactgtcccaggctcaggtcccagcacagcagggctctgccttaccctctccaggcctgggtcctcacctcttccctgtcttcatctggaggccacagaccggcctcccgcttcccacccgcccgggctcttcctgaagccgcagctctctccagcctctggaaagccacccgccctcaccccacaacccctcccaggggcactcccaaggccatagactgagcagggggtgcaggggtgaggcaagggaacccacggtgggcttgtctaggcttttcctgattgtctgccagggctgagccacacctgtctcctgtgagacagcgaagcctcagtgaggcctcgagtcagcccggacctccccgggaggcctcagggccccctctgactgcaggggttggaagtgtcatcccaagggctgagggtcagagagggaaagggacctccccaccaaaagaagagtctgaggaggctggaggggctgcggtgggctgcccagggactctgcgctcatgccctggaggggatctgggccaggtggctggctgtcctctctgccactcccccgaccctgctgagggcaccctcagccctgctctccagctcccgcccaccggacgctaacccgctgaccgtgcacaggtgcagtcacagcacagcctgcatgagaatggcgcgctggtgccactgggtgatgcgctgtacgtgacgggcggccgctggcagggcatggaaggtgactaccacgtggagatggaggcctacgacacggttcgggacacctggacccgccacggcgccctgccccggctctggctctaccacggggcctccaccgtcttcctggatgtctccaagtggacccagccctccggccccacccaggagcactaaaccagggccagggtccccggggaggagtccccacagcggcccctcatcagcctgtggaacggcccctttcattttcgcttatttgttcactcggagctaccattccttccaagctgcgctcaggccaccaggggtgatcagacggcatggcttggaggacacagccttggtctctgtggccaccacactaaactctgagctgagcagtgacaagggcctgagtgccagacgctggcataacagggacaggaagctctgctgcccctggggttcccgagacctcagagaggggagccgggggccgggccagcattcccagagcttgcgagccccactcctgcccctggaccccagcaggggcttttggagcagttgcatgaatgtggggtgaacacggagcgtcccagaaagctgaggctgctggggaaggcaggccccggagatgggatcagcaccaggtcctcgtgggcctgcttctgcccagctcacggcagcgtaactgtggccagccacctcccctctctgggcttcaagctccgcgtccaccacacacggggctggctgtgtgggctttgggtccccactcaggctttgcatgttggtgctgtgtttctgcttctgtggacaaaggaggcccccacccatctcttgcacccagagggcggtgcccacagaggcaccaggaaggagggaggcagggcgtggggcggggctggagggtcccagggaggtgagcagttttgctctcagaagggattgcctccgtctctgtgtgtcagaacaaaggctcttcattagaatggaatttcccaccaggggacgactcttgggtgcattggtggcagcctcctgagggtgaggggtagcatccgatgggcccctgccagcatgcagcccgactccggctggctcaggctccgagtggcttctccctcatcctgaatgaggcacccacctttgcagctaaggagacaatgaaggactctccctgggtgcccaatggcgtgtccctcctgtcacaggctccgccctgggacatggggctagaagtcaggagtcgggcccggccaggcacaggccctggtgttgccccagaggccctgggcagctccggtctcccgccggatccaggcttcctctccaggaccagcccctgggttcctccttaacaccccccgcccctggggaccagaggggcctctgacatccttgggttctgaggacggaaacccctgagcctcttgagcttctgtaggtagggatctgctttgctcccagacctgcctctcatagcttttttttttttttttttttttttttgagacggagtctcgctcttgtcgtccaggctggagtgcaatgctgagatcttggctcactgcaacctccacctcccgggttcaagagattctcctgccttagcctctcaagtagctgggattacaggcactcgccaccacgcctgactaatttttgtatttttagtagaaacagggtttcaccatgttgaccaggctggtcttgaactcctgacctcaggtgatccgcccgcctcagcctcccaaagtgctgggattacaaggtgtgggagaagtgagttgaccctggagggccagacagagtggggcctctgggtgctaccaaaggaacaagagcccagagctgaggagaccttcggtggcagatggattggatgaagcaagggtgagggtttctggggccctgggctctgtttccatgtggaaatctgaaatgttttctagacagtgatggaaggaggtcagccaaagggctgtttaaaaacaaagcctccatgtaaaccatttctgcaagaatattttaaaataaataaaaataaaactgaagacatgaaatgtcaaaataggctggctttgatcacaaagtagccaaaagggcggcgtgccagagcaacgcctgctgtccacccttgcacaccctatgggaatatgggcggtcctcgggtggaaggagtgggcctctccagggcctggctcccagctttgaggtgccaaagtgcacctcgtccgatcagctgggctcctgattcagggggccatcgcagccttcagggcaccaggaggaaaggggcgtctgctgggtattgaggtgagtggctaaggagagtttcacgacggcctctccccatgctgtgggcagggtgaagggagcccagtggctggagaggcatcccaggacagcagcagtgggagtgccaccccccccaccccgtcttgggagaagggaaagggcagacgcagactccagggagctgctgagagagggccttggcgggggaacgcagccaccacccctgttgtccagctgggaggaggtggcagagtccatctgccctctctctctggcctgccccctgtctcccactagcgcctcctacaggccaagcccaaccagaacccagagggaagagaggccattgacaggctgtagtggccacctggggacacagaacaggtggagaaggtggccagggcaccaggacggcggccagaaggtccggcacacgtcacccacttgagagctttgcacgaagggacattaatgcactcactcaccaagcgacagccatagggcagccaaggtatccccttccatcatcaaaatccaggacagcaaggactcattagaaggcttgaggctaatatgggcttctagaaaggggagcgcgtagccttggaacatgtgcaaatgcccacaggggtgtgcgggcgaaacccacctccaggccccatgtgctcatgtcctccaggtaggtgcgtgttgtctttcccatagaggatgctgggtaaactgaggcccctcagccttcagtgagcacacagggccctcagccaggcccagcactgccaactgtatctcagctcccccgggtccccaagtaagctggggcctaggcatgcttccagccacttccaccggacttgagttttccaacacctcacagacaggccccttttattatctggcatcttctctattcaggcagggacagtggttgctgggatcaggccattgacaccctcatgtgactgtaattaaatggactggtcacctgacagttttccatagtcagtatagaccatgacatagcttggagatctgtcccctccgaatctcatgttgagtctgttgagtctgatcgctggtgttggagttgggcctggtgggaggcgtttagatcatgggggcggatccctcaggcatggcatggtgcagtaacgctggtgcgttcacggagagctgatcgttaaagagcctgacacctcccctgctctcccttgctccctcactgtgtgacacacctgctccccttcccctgccaccgtgagtggaagcttcctgaggcctcaccagaagcagatgctggcactatgcttcctgtacatcctgcagaactgtgagccaaataaacctcttttctttgtaaattacccagcctcacattttcctttatagcaagaaaacagaaggatacaggccactactccagttggttgggccatcagttgatccagctgaaagcatgtgtatggatggagaatgtgccaatggcttaaggagagagggcacagccacgtacacaggaaagatgctgcacctccggggccgtgtcattcaccgtccctccccagtgcccggcgtggtatcagctgatcggtctgaagtgtggctgcttctcccggactctgcagcaccaggtacgtggcagggcagccaggtgtgtggctgtcactgagactgaggtagactaggacaggaatctccatgggggaagtatcctgtttggaacaaaccccaggagacatcatgactccctcagaagccaagacgattttgatcacagtcacatttaagaatgtgattctttccaaaatggcattgcattcaactgagaggagagctaaagatgattattttaattaatctattaaaaacatgtagacaattagcagaaaactcaagagaccctctgggcaggagtgagaaagaattgtctcccgagagacccgagactgcccacacacccatgcaggaggccacaatgtattccgagtgctcggcctggtgccggcacgtcatgggaactgcacaactgcacaaatgctcactgaactgaactaaatctgtaggttctccagagcaactgacctcaagttgtaggggccagacctggatgtggtttcatttattggctctgtgaccttgggccaatcccaagatctgagcctcagtttcctcatctgtgcaatggggataatcacacgatttgcaaattagatgacgtcgtgggcttgcaaggcccagtaaacagcgaaggctacccgcctgggcctctggaggccacacaacaagctgacttcacggtcccactgttttcagggcagagggaggttttattcccatgacttcatcggcaaaggtccttcctctggaggaagagagaagagtgggaacagcttggctgcatcaggctgctgggaagccaggcccgggccgtgacatgagggcccaagaatgaggattagatttcagccaggcgtgaaggcgcatgggggaggccacttcctgctccagtgatccccgttctgtggccattcatttagttcttccatcctgggatgtcctggctcaccccgatgccagccccacttctgacccatgggctgctcctgcagggggaggcccccatttctgctgctccttgatctgcgcaattctttgctaagctccaccttcctctgagtgaaagccactttgaaatgtgaacgcagacacatgcaggggccccacctgaagacccccggcctctctgctctctgtccccaacccaggcggagtcatcctctcaggatagtgttacaggaggctgccccagcaccagaaccgattggatttgggcctctggcagggcccatgacatcatgaggattgttcattgtttgggaaaataactttttcacatggcaacggctcctgtcctcaatgctggcctgaaagctggggccccccactgcgaagtggaatgacatcacactagtatcttaagggtaatgttccccaaatcagggcacctcatccctgcgtatcctcagtgttgccgacggtggcagagcctgagcatcaccttcccagggctcgggtggggccaaacagcatccaccttgagccatagctgcagccagggccccagagggaattcagacctgtgggatgcccattcctcacagggaaaagatggggctatgttttctgcagtaatgctccaactcatcacgcacctcttatttcacaccaactagaataggaggaaccctaacaagccaaacataaggccgtgaagatgtaacctgtccagtgggcaggagggcctctgcagccccacgccggctctgcccatgggctgcgtcctgggcaagccgcccacctctctgggctaattggtggggaatcaaatgaggtgctggtgtggatgagcttctccagaagcaagaaggtgccattcacacagctgcaactcctggggacaggagcccctctctaccagcagagtacaggagaacatggcacgccagggtcctgtggtccacagatacagtccctctgaataagtgaaaccgaatgaaatgttaacacattacaccgaatgtgcatgtcacattcagacatgtcatgacaaagttccacacatcaggcttcttaacagacattccaatagaaccagacatgaaaacccaccagagaaacccttcactctctgagggccttaagacatctccctcatatgcgtgattttgggagcaaatgtccttaattgtgacaaacctgcagaatgtttgcaggtgaaataagttcagatatcttgctgggcacatatgacctaagccagtgtttctcatatttctcaaatgtgtcttaaagacttgcatgttttataggaattcaaatgttttcattgtattggtctttttaaaaaaaaaaatcatttgtggctttttgttgagacggagtctcgctctgtcacccaggctggagtgcagtggtgtgatctcggctcactgcaacctgcatctcccaggttcaagcaattctcctgcctcagcctcctgagtagctgggatgacaggcgctcgccaccacacccggctaatttttgtagttttagtagagacgggatttcaccatgttggtcaggctggtctcgaactcctgacctcaggtgatccacctgcctcggcctcccaaagtgctgggattacaggcgtgagccaccgtgtctggcccatttgtggcttttaaaggcaggacttccctcttgtgtcctcacctgccattgaaagacatcttcacagagtaagtccatgggacttacccctgccgggcagattctcatgctgggcagggtatgtttttctttaaacgtcctccccacccaactctacaccattcccatatcctatgggaaaaggggtggaatcacagggaataattaccttctgatcccatgcttttcctaaagtatgaagtatttcctggtttccccacctgccaggcatgaggccagccaggtggaacatcgcatgagtggccagaaaaggcaggcgacaaaggccagcttgcatctgaggacggaacttggcccatccccaagcctggggggcaccacctgcggctgctggtgcccctttcagtccctgctgccacatcctgtgaaccaggacagggtaaggcctcctttccccagcgggctcttctcaaaagagttccccgggaacagcagccctcggtgtgagtgtaaggtacttttccagcggagccttctcccgttctttaacaaaaagcactgtgtacccaccaggggcaggtgcctcgggggtggggcaagcgagccaagtgtgcgaccctcctcggcttagcgtccagtggtggggcagatagtcaaaagggcatgcgatataacaaagccaggggtagggtggggctggggctggctctttcctggtagggccgcccagaggcctctctgccaccttctccgaggcctgcagggtctggtccacctctgggggcactgattccggtgggcggtgggcagcctggcttccggtctggtctgcccccacacccccgctagggcacgataggggtcagttctcccagcccaggccccgctcagccccaccagggcagggcggctgtcctgagttgtttcttggctccctgcgtcttctgggtcccggcaggtgcgacaggtggggaagaacagtgaatccctgcgctcagagcacgccagccatggacggagggcggcctggaaaggggagttcccgcctgggaaaggggcgctgagaaggggccctgagggtctcccggctcagatttgctccacctgtgtcatagaggcctgggccttgcggggcgcagccaggagaatggggagggggtacctcgggggtccctgcagaggacgtgggggacagagcggggagaaaggatgcctcgagccgtctgggaggaggcagcgcctggctccccgcaaagaaaatggggtcgcgagggccgagggtccagggctgggagaaggggcgcctcgctccccaggaagcagaagcgctggacagcgcgaaggagggatcccagaaccaggagttgcaggggggacgcgcccagcaggggaacacccctcgctctccctgccctgccccgctccccgtgccccctcccccactccccctcccccgcccggacactccccccatccccatgcagcgcgcacgggagccgggagggggcgcgggcgggcgcgcggtctcgggcgaggcgggggattcaagcgcgttataaggcgaggagcccggggcgtccgagacgccgcgctcggagccgcgagggaaccgccgcccgcatggccccggcccgccgccccgccggagcccgcctgctgctcgtctacgcgggcctgctggccgccgccgccgcgggcctggggtccccggagcctggggcgccctcgaggagccgcgcccgcagggagccgccgcccgggaacgagctgccccggggccccggggagagccgcgcggggccggccgctcgtccgccggtaagacgcccgggcccgctccagacccagcccgcgcccgcacgccccggctcggggcggcgggaggcggacgtggaggccgagcccgccctcacccccgagggctgctgcatcgcctggcaccggggctccggggctccgcagagactcagggccgtgtagacgccgccctcagcccggcggggcagccttgactttggctttggggtagtttgacttaaagcaaggttctactaggtcggcgaaaccccccttttcttttgggacagaaggaagttgggaaatagataaagtgtaaataacttgatttgaggaaattgggaagaacgcatttgtaaaaagtgtaagcgaattactgccaccgcccccaatctatttggtgcaattatctggaaaacaaaaagtgttttcctgcggatctggggtcggggggctgtgcagggtggggaatgacatgtggctttgagtcaagtgatcaggtggcttttggccgtgagtgggtgatcttgagctctgccctgccccctcctctccagggttttggagcctggactgctgagcagagggtggtccggttggggaggtgtggcccaggcctgaggaggggagaacttcagaggagccctcagtgtggccgggccttgggtcagggagacagggctgccccagggaagccggggtgggcggccggtgctgtttattctgaagatgctcaggggcagtagaggggagagccaggaacgcatctactagagaggacaggggtgcagccaggcctggggtcccccagagttctctatcccggccccatcacacccagccacttcccagggactgaaggcaccccctccccgtgcagttggccaaaccacccaggtgggcacagcagccaaatgtcagggcactgtcagcaggaggcagacggggctcaggggcttccaggtggagttttggccttggaccctgtttgtgggggacacagtgacaccagaggtcctcccaggctccaaggcttgtttctgagagaccccttgtggctggaaccagggcagctgcccaatacccacccccattgctggggccgtctcctgggacgccaccttctgcctgttacagctctacctgcaaaccacactggggtcagggtccggccacaggccacaggtgcagctgggagggtcagctgggcacacccctcctggccggtgtgcggcatcctcgccccatgtttccacggagggcacacaggaagtggaagagggtcctgggagggggtagaggggagatcagccagcaggtggtgcagttgaccctctaaggcacaaggaagcactgagcagcgctgagggccctgggcccctgaaccctttctccgcccaaccacaggctcctcggcaccgcagcccccatcttcccaccacaacaccctggcctgcgcattggtcagccagctcccaaaagaaggccctgcatccccccagatcagccaggaaccaaaggcagtgacttggcagccggctttgtctctgataaaagggcccagtcagctctaaaatcccagggtccttccgtcagcccccagcgtcagcacccatgacctcatctaagccctcttgggccggtttccttcccagctggcagccttgcctggagcccagatagcccaaggcctctcccaggaaggtccctcccaaaactgtgctcagtgtcagcatcagtcaggatgcagcgcggacaggaatgggaacttccggaagcatcactgtccatgtgtcagtgtctcagaagtgctgaggaaatgaaagtctcacacagaggcctcgcgtcatgacagctcgcctggtcctctcccccactggactgtaacccgaggcagctgtgagagctgaatttgcctccttagaacttctgacactgggggaggatggacagaggagggttggctagtagttgggctccctgataatcacagttgcttcttcctgagcacctatgggtgctccagtggtcggatcctcctggtgactggaggacggtgtgatcactgcagctcctctggaggaaggaggcccagcagtacggggattcaccccgatatccaagccctgcaccccattttccctccaggcatcttgggtctgcctctcccatgagtgccaagtccaggccgaggtgtggcccgttccctaggagtcatcctccacgggccgggggagaagctgtgaggggttggggcccctttgggagctgcctttgagggcaccacaggtgacaaggaccagggtcccagagtacagaaggccacacagtcacctcctgcaaagtgtcccacctgcttggtaggagcccagtgaggccaaccgccctgctgggctggctgtgttccaggagcccaccgctgagcgtgcacacagcgtcgacccccgggacgcctggatgctcttcgtcaggcagagtgacaagggtgtcaatggcaagaagaggagcaggggcaaggccaagaagctgaaggtgaggccggcatcccgtcagtgccaggccgtggggggttccgcctcctcgctcctcatccactcccactcctacatcctgaacatttccaatagcacacccctcacgcctcggcctggggacagagaacagagagaacccaggcagccccagggggagccccgagttaggggcctggtcccaaccatttccccacacccctaaaatgccaggctctccctcttttctcctccctctgcatccaggccagggaggctgggctagcccaggctgtggtgagaaccttgtccacactggaggggcctgcaggagtgcctggctcccagggactaggggcacagggtccctctcaccctcactcagccttaggtcttggcctgggcagaaacttggtgcttggtcctggtgctgcctcctgcttggagcccccaaaatggaaaatacggggtgtgggcttctctgtcccctgggggccagtatcacctgcctgggatctgaacacacgatggaaggccagctcggagtgcatgaggcaggtgcacaggccgcgctgtcctcgtggcctggccttctacctctgcccagcctcctggccctgccctaagcttctccccacagggggctcactggcttctggttcgggtcccaacccagcctagtggggacctgctgatggtggactcgggcccagtgcagaccctgagatgcaagtccccaaaagcagcctagagtcttcttccctccacgaggcctggccgcaggagcgggcttcagccctctgcctccccactcagagcagagtccttccctgccaaagccccgccccgagggcccccacctccagcacagtccttgtactcactccaggagaagctttcactgaggtagatccttggctggaggttggagcccactggggagctctgttgcctgcctcttagtggcaagagcttgcacaggggatgctgtggctcccagcctgctcctcacatgtcctcactgccaaggttccctttcagttcggcttgccagggccccctgggcctcccggtccccagggccccccaggccccatcatcccacccgaggcgctgctgaaggagttccagctgctgctgaaaggtaggggtgtgcaccggctgggacacacacaccccgctgtgagcagggcctgggagggtgtcccgaggagctgacagggccaacctcaacacttcggcgggcacccaaggaggcacctgctctgggctggactcaaggacagtagagctggccaggtccagtctctgccccatcttggcccatgtctgccaagggtcagggctggggatggctgggggttgggaaccatggccaggagaaggcttcacagaggaaggtggacctggccactcagtatggcgggtgctcagggaccagcgcctatgccctgcctggaagtcaggagagcccagcgaaaggcagaggctagtgtatggggcagcaccaggtggagctcagcctggcacccacagtcaccactggccagggctggggcagcctgccctggaggaggcagggctgagtggagccgcggagtccacactgaggcctcctgcagagcggcggctcacattagtcattagaattgagccgttttttccttttagttcaatgtcctgttcgtttaaatatagcaccttctgcgctgaagaacctccttgtacttccagtaaagctgcaatcgcttattttacccccagcgtctttggaaaatgtgggtggggtagaggtgaggctggaggccaagggcgctggggcacttctgcccgagcttcccaaatcttgagggaaacgggagccgctgcagggtcaggacgcaaagactccgaggcccttcaggccgaggggacgtcgccctcgccccacccctgcgcccggcaggcccctggtctcgctagcacctgtcgttcagggctggacccacgcggcgggcgggtgaggggtccctggcgcgcggccaccgctcgctctgtgccaggtgcggtgcggcagcgggagcgcgcggagcccgaaccctgtacgtgtggccccgccgggccggtcgctgcgagcctcgccccggtctcggccaccgccggggaggacgacgacgacgtggtgggggacgtgctggcactgctggccgcgcccctggccccggggccgcgggcgccgcgcgtggaggccgctttcctctgccgcctgcgccgggacgcgttggtggagcggcgcgcgctgcacgagcttggcgtctactacctggtgagtgccggcgcgcgggagggcgggtgagtccggccgggcgggagccggggtgaccatccgtgcccctcgcagcccgacgccgagggtgccttccgccgcggcccgggcctgaacttgaccagcggccagtacagggcgcccgtggctggcttctacgctctcgccgccacgctgcacgtgggtgaggcccggggcgtgggaggatcgcccgctctgtcgcccaccccgccgcccgcccgcttgaccacgtcccaccctcccccgcagcgctcggggagccgccgaggagggggccgccgcgcccccgggaccacctgcgcctgctcatctgcatccagtcccggtgccagcgcaacgcgtgagtgtaccccggcccggaccccacacccgcattcgctcggcctccacaagctggaggtggttaaacaggcactggacggggcttccgcccgttcacaccccaccgtggcctaggtgaccccacaccttcttccaggtctcccggtctacttctgcccctatcaggccttcccttcacagcaactgggagctgttaaaaatgacctttccagctgggcgcggtggctcacgcctgtaatcgcagcactttgggaggccgaggcgggcggatcacgaggtcaggagatcgagaccatcctggctaacatggtgaaaccccgtctctactaaaaatacaaaaaattacccgggcgtggtgggtgcctgtaatcccagctacttgggaggctgaggcaggagaatggcgtgaacccgggaggcggagcttgcagtgagcagagatagcgccactgcactccagcctgggcaacagagcgagactccgtctcaaaaaaacaaacaacaacaacaaaaaaaaacctttccaggccactccctgcccagaccttcacctcctccccaggtcctaggaggccgggctcctcctagcctcccaactccttcccacctcagggactttcatcttggggctcgaagcaccagtgttacttcaagaggcctctccagacagctttctggaggccccctcctcagtcgccctcccactcctcacccgggaactttcttccccatgatcgcatcccttgctcctgcaccatctggcccacgagtgcagtgactgtgagctccctgtctccccacacccagaagggagcccaggtacagcggagataccctgcgggtaggatagctggagcagacttgaatgaatggatcaagtccaaaacttcttagtctgcctttgaacccccagagtgtgttggcctgaactaacttagcatcacctgccaccacatccccacttccggctgcatcagccagtgtcctgtttcccatcagagccagggctttgctgcctcttgctgggccctcgccttgcctttcccaatacagcaagcatgcctctggccctgtgtccttcctcctcttggggactcggttcagacaccacctccactggaagacctggccagggtcaggcactttgctgggcatgtgttggctgctggcaggattgtgtgtcgtaggtgaagttggtggggtctcatggggcaggctgaccctccctctgttttgggtacagctccctggaggccatcatgggcctggagagcagcagtgagctcttcaccatctctgtgaatggcgtcctgtacctgcaggtgagtgcggcaggcttgggcatcgaggggcaccgcctgggcatggccacgggtggctgggtgcagaagggtgctgttagatgctcaggatcactgggtcgggtgcagcaccctcagactccaggcctgggagagggtccaggacatgccaagttctcactttggtctgggcgcagccaggcttcaagtcctgatctccttcctccaaacacagcccttccccgagggcacctgcccgcttgagcagctgctccgctctgcattcccaatattcagactccctgagcacctcatcctgaggcccagtactcctggccaccacaagcccgctgaagggactggtgcagggagggaatggaggccagcactctgcccaggctgacgccctgagtcccctgtgactatgggaagccagatacgttattttcctacccaaaaccctaagtgaccatctctggcactgtgggaattttggcaagtggtagagaaatggacataaaggtggaatttactaacaaagaaaacaattgagtgcaggtgtgtggaataacagctgctattgaattctcccagagctttggagaaggtagagctactccccgagttagcccaagttcacacagcagagccagaaatggaggccaggctgtctggcccagagtctgtgcttgctgaaaggcatttagaggtcccttctgggtgccacacagcatgcttggtgaactcagatggtctctgccccacctggatcttaagatgcagatcctgaggcaggtctgggtggatcccagattctgcatttctgggagttcccagggaatgtgacactgctggtgcatgaccacgctgctggtgcatgaccacgtttggagcagccaggctagagtgctggtttcacggaaggctctgccaaatgactgcctgtggggaagggccaccctcccacctgacttggagcccttgcaggctctgagaagccctgcagctgagaaacctgttggactcttgaatcccactctggccttgagcaggggcccactcccacacacgcgaactgtagggcgctgcagggaaagcagaagaggtgctgggtggggcccaacccgtgcgggcccttgctctgtgaccttggcggccacattcttctctgggcctgagcccttcccaaaagcggggctgagtgggcaggagggagtgtggctggctggcccttgggtcacctctgcaggctgttggggtggcccagtgcctcaaaggcaccctccttgcagatggggcagtggacctccgtgttcttggacaacgccagcggctgctccctcacagtgcgcagtggctcccacttcagtgctgtcctcctgggcgtgtgagcggccaccacaggcccttcctctcaggggcaaatggagcacagatctagacaatgtgtggacagtgtcagagtagcagtggccacatggaggaggaggcccacccggaactctgcccacactggccactgcagttcagcccacagagccactgcaggcaggcctacggacgtgacacgcacgctggtggtcccggagccagggttgattcaggacaccatcttgggctcttatccaggaaagaaagagtcggcgtgcctgggggcacctgctagtctccagctgcaggccgactctttcctggcctgctcagcacctgcccagatggcctctgcgtctttcctgtgcccagccccaccttttccacctctcttcatgttctcatggagtgcaaagtgcaccagccagggcccctacctgggagagggtcagctgacgcagggctgagggggctgccacagggacgtacgctgtgtgttcttactgcttagaagggacggggtcactcaccactcccctggtctccatctgggctccttggtcttccctgcccctcccctaaccgtgttctacctgccagtggagctgagcactgcctagcctgggccagaggggcactggacaagggcctttgggggacagtaagtctgggcccagcttctagttctaatgtgtgcaagattaactcacaaattcacctcagaaggcctttccaaatgggagctccactcttcccctcctctgcaaatcttcacagccaaggccccttccaccctctccagaggtggatgagatcccttttcccctcccctctgaggtgctgactcactggtaggagccacccaccagaggaaagatctagaacgtctttacagattggagacagccgggcctgctgacccatcatccgaatagctgaagcagagtcttccaccaggggtgccagggcctggctgggtccagcggctctgggatgagcctcccaagcatctttcccacttgggtggccatgcggcgctgacattggacaggtggtggacgagagatggtcccgagaaagggtggtcttgggagggctggtcccaagcctgctgtgctcctgtggcagtgatggggcctggggatggggacggcagctctcatgaggacacacaggctgtgagcccgcagcctcctcaaatgtagcctcccacattttccccaaagtacaggactgtcccagagtaggtagtgaagaggacaaggccctcggcagcgacctccagggcctcctacctgctgaggaagagttaacccactgcctccccacacaacaggctacgaagaacctggtgcctcaggacctcctgggagccaagctggtctggcaagggcgctcaggcctgggagagaagggagcaatggccagtcaccttcaccttctaactaactagcctccggatgaggtggctgccaccaggcccgaatgatccccaggagcccagcttccaaaccccaacatcgaatcaaacatctccatccccaagtgcagtaacacacaaaaaccaaacactctgccctgggaaaggcctggtgcgattctcagtaggactcacacccaccctacctagaagtactgggctggcctgggtactgcatccgtgtgttttgataagggggtgatgtggccacgcccttatctagatttcactttgtatccactgggcacagatattctagagaacttatctttcactcttgtaaaagccacatatccacatctctttcatttttctcagtgtgttatgcagcaatttattaaagtatttattgtctaataaatactgccaagtggaatatatttatataactgacttcgtggggtggttcaagtacttacttaagaactatgtgacacaacagttacaaaacaaaaggcagaccttaagatccggaatcaatcctttagcccaggttcactaaactaagcacagtaaggaggaacctggaaggtgaagtggagatggcctccagcctctacgtgggagggactcccttgaaggctgggagtgaaccttcctgggaaactagggtcaagcctctcgggaacagtgggacatagggatgtatgagtcacagacatcagtgtgcaaacacctggtttgctataggaagatagttaccaaatgaatggttctatttcctgattctggggtgccagggctcttttcttcaatgaggccacactgtacaatgtcccagtcctcaaactgaaatgggtacttggctcttaaaactccctggggaaggaaggggcagcaccaacacttcgttcagttcttacttgtggcttttacacaacagacccccaggaggcatctaaggtttacatgaagcctttaccactgaggtcctcgcagcatggataccaattccactcaatcaactgggtgataaaaccatgtgtgtgtgttgggtgggggccagggaacattacaaaacagattctgaaaacgcaaatttttagaatcttacatcatcctgagccaaacatttacacaaaaggatccaagagctgctttactaaaaactacttacagtcataatgatgacgttttctatataaacaagtgcttgaaaagtattttaaagcttattcttctgagcttattattcttcatgcactcttttcatgcttttaacatctttaacagaagtgtccccctttgaggtgttattgcaaagattaacctcattccagcacagggccaactccccacacctacctcacgtgggaagcagaatttccgggccatgctgagcagccggctgcctgctccaacaggaaggtgcacacctacacccagggagtccagatggaagccactgaaccgagtcctccacagactccttccaccagactgcagctctcaccaatggaatgagaatggctaattctgtactgtttctggcaggtctgatgcatgagtaaccttgtctatgagtctatttcctggctaagcctgagctcatgctatgtaacattttgcaacactatttccatagggaaaactgaaaagagctagagggttcccaaagccctggtctgggcctagccttgactaaccagtcatcccctgggtctcttcattgcaacatgccacttccccaaccagggtcatcatgacagtgaaagcacagcaaaatgcccgtgaactacaaaacatcacacaaccagcagcctgc

SEQ ID NO: 13 - DNA, 4147 bp, Homo sapiens
ggaaagaaatcatcctatgggtactgtgggagagggccaggaagagccagagaaatccacaaagttcaaaacggccagaccctatcaggttccccagggagccagcagcttatcacagcttagtcacagggttgtgagaaaacccatgcctcactggaaaccccccaaagaacaatgacccccttgatccaaatcacgtcgtggcccccggagtgctcagatcctatcatcaggaacacaatatccccatttcagggcctccgtcagaaggctggccggcacatccgtgagtcacagaacggaaaggaaggcagcgcgcatgttcatggaaagaaatcctgtttgtctctctcctttcttctgatacaaatgcagacagtttcccagttgtcaaaattgaacatgatacgaggaaaatagcttggtaaaaaacatgcattagtcattcagcagtaaaattttccaagttttactcatctcatcatcttgaccactaaatggactttcaacagtggatttctctgagagtggcacaagtgtgttaaggaattgtcacaggcatggcgcctgctctgagctctgggggcttagacccctcaaaagctcacagcccctggaattcactaagctgcagagcacaggggctactaaatatttctccaactggacagactttcacgtggggatagacaggattgaattacccagattcagagaaaaagggtctattatctcatagaacagtctgaagttcaaccaggaagccatattttccacttaaaaccacagggcagttatccaatctctgtgcaatttcatcagaggagaggtgagactgtcggggggcggcagggctgactgggaggctgtggagagggtgtgtttaggatgggcgacctttcctgtgggctaaggtaggaaagcagaaaacagttagtgtgagattcttggtgtcctcaagagcagcctgtgtaacagaaaagaccgttcttagttccttcacttttgattaacatcgaaggtattgtttcacatttctaatgtctagttttccttgggtttttaatagcactttcaggaagacttaattcaattaatgtttggccaggggaggtggctcacgcctctaattccagcactttgggaggttaaggtgggagaatcactttaattcagaagttccagaccagcctggggagcacagtgaactcctgtttctacaaaaataaataaataaataataaacaaaattagctaggcatgatataactagcctgtggtcctagctactcaggaggctgaggcaggaggatcacttgagcccaggagttcaagaccagcctgggcaacagaatgaaaccccatttctacaaaaaaaaaaaaaaaaaaaattagccaggtgtggtggtgctaggctgtggtcgtggctcctcaggaagctaaggtgggagtatcgcttgagcctaggaggtcaaggcagcagtaagcagtgactgtgccactgtactccagctgggcaacagaagggagacactgtcaaatatatacatatatactacaatggctattactacaaatagcttagaataactacagtgagggccgccgcagagactggagctctcacaccctgtggttaggaatgtaaaatggtataggcactttggaaaactgacagattcttggcaattaaatacacaataccacatgaccccatcgttctactcagagctatttattcaagagaagtgaaagcctgtgcccaagtgaagacttttgcataaatgttcatagcagctttatttgtaatagccaaaactagaaacaacccaaatgtccatcaacaggcgagacggataaacacatcgtggtatatccgcgcatggaaggaggcatatactttctgtcttgttgttggggtggtttcaggacatgcccatgtgtcgacacatgtcaaattgtacactctgagtatgtatagtttattatatggcaattatacctcaattaccttgtttaaagccttaaaaatgctttccagattagtagtaattggggtcagggctcaggggaaggtcaaaagaaaactttttagagtgataaaaatgttctatttcttgattgtggtgatggttacactacagctaccaattgctaaattacaatgggtggattttattggatataaattgtaactcaataaagctggggaaaaataaatttgcactgaaatatctttgcatattaggacaagggcagaatactgtggtaacatgtaatttttatttctaataaagcagacattgtagttgcagagaaaaaaattaaatttaaatttaaattttcatttctcttggacaaatatctaggagtagaacaacgaggtcatgcggtagttgtatgtttaattttcaagaaaccctcaagaaacgctttctcaaaagggaaaaataacatgtttacattgaagcaaaaaactaatatcttcttttttgtattgattatctgaatattaaaaaacaattacaagctgaataattattcttttttttttttttttttttttgagatagagtccccaggctgaagtgcagtggcatggtctcggctcactgcaacctctgtcttttgggctcaaacaattctcctatctcagcctctccagtagctgggactacaggcacgtaccagcatgcccggctaattttggtatttttttgtagagacagggattctgccatgttgcccaagatgatcttgaactcttgggctcaagtgattctcccactttggcctcctaaagtgctgcgattacaggcaggtgccactgtacccagcctgaataattattcttgatacctagtcacattctttaatcagttttttagccttatttgattctatcaccattagtggcattttttcagaagaatgcattattttcagagctatcttattttaatctctcataaaattgcctagaaacttctttaagaagacatttttgtggctaatgaatttgaatttgccgaccagctaagtggaatcttctccgtagaccctgaggttgtcagatgaatgagcatctgtggatgagctaactctgctcaggacaagacagtttcaattttttctaatggaaaggtcaatatttcaccgagatattgtcacagatcctgtgttctgacttcaatccaaaggatctttctttcctaagtgtctttatagggcaaattgggtcaaataggcttttttcatgcatgattcttttaaatattttgtcaaatttaggtgttaaaagtcataggccttttcaattttactccattctgatacatactatacatatatccaattaaaataagagctctacaaaatttgttccacacattgagacacttcaggaataaattttagaattccaaagtcactctcctacacggggtagacatcatgcattttactcagttcctctcttacttttgtggtgacaaatttaaatagtctttctgtttgcaatcttgtttttaataattgtaataatttgctaaaagtttcaaaagtttttagttatgtatttgttgaatggtttgattaaagatttcccactgatttggaactaaatgcaaggtaagtctagaagacccaattacgcacacacaaacacacacaaatctattgtaagtcatttaggtggatttataaactactttctctggggctgtgcacttctaaaatctaatgatggagcaaaaaggaagaaagtatatattgtcctgattaaggccttcttgccacttctattagcattgttgtggcaatgttgcattttagtacatgtaaaaaatttgtaagttttaatatcggcaactttctcttgaattagaggcgtattaaagtttaagactcacgcataaattatttgttcactaaaaacagttccaacttgatttctgctctatgcttttttttttgagactgagtctcgctctgttgcccaggctggagtgcagtggtgtgatctcagctcactgcaagctccgcctcctgaattcaagtgattgttgcgcctcagcctcccgagtcgctgggattataggcgtctgccaccacgcctggctgtttttgaatttttagtagagacggg

SEQ ID NO: 14 - DNA, 3580 bp, Homo sapiens
gttcatagccggggagctggcagaaatagcccagctaaaggactaggatggaagggttttttttgttgttggttttttttttcttttaagaactcaggcttaaaaatacatttctctttgtcagcaaaatgttctagtttcaaaactatgaatggtagactacctctgtcagactaatgcttttctttttacctcagatactgtaagatacgagttaccttcaaattaaaggtaatacctataccaaatagacttagatgatagcagctctgagcaacttgggacattctgaatacacaggacaattctagcccctggatttgaacaggtgaactctgcttacatcagaaggccctgaggaggacaggtagaaacagagcaaaggcccaggaagattttttccttcctttccttctctttccaccctctctccttctctctctcccttccttcctccccaaattatttgtaaagtatcttctaagtgtcagagtctgtttaggaaaagatatggtggagaaatggaatctaggtatcacctccaaaacctgtgccctccagatcacccaggaagttgacagaggctttccttcagaggcctacactaaagctctctcaaaatgtttagttggcagaatcatagtccctactttccaacaataagtttgttagaattgactcttgagtaagagcttagcccaagactagatcaggaccttacaatgagaagactgtatttttaagttgaggctatcaataaatagacagaaacaaaattttgcctttggtaccttctatcttctttttacatgtctaagtttgcttgtgttgttcctggccactcagtttccaactgacaggagtatagtgtccacatagatgttgtttactcctgcttcccctagtgcctggcatagggctggcacttaatagctaattaaatagttgttcaatgaataaatgagtgctttcccttcaaatgcccctattctaaatttcctttcactttcttgttgctcaactaactcacctcccaacccaaactccaagcagttttatctcaaatccttgttctgtcattttataataaaaaaccttgggcaaattactgaattctctaagcttcagtatcctcttctttaagtggggttaataaaatttactttacaggtatgctttgaggattcattggaaatttatatacagaaaacttaaataaaatgccttgtccatctcttggcatgtagtaagcatccaaaagagactgattacctctttcttcttttcaccccttctgataatctccatcaagtattagaaaaaaaatgtagttaaaactaggcttgttggccgggcgcggtggctcatgcctgtaatcccagcacgttgaaaggccgaggcaggtagatcacgaagtcacgagctcgagaccagcctggccaagatggtgaaaccctgtctctactaaaaatacaaaaattagctgggcatggtggtggtgggcacctgtaatcccagctactcgggagtctgaggcaggagaatcgtttgaacccaggaggcggaggttgcagtgagccaagatcatgccactgcactccagcctgggcgacaggcaagactctgcctcaaaaaaaaaaaaaaaaaaaaaaaagaaaaaagagagagagaaagaaaaaacaacaaaaaacaagtcttgttaagttatgaatgaggaatgagtctaatccttctagactacagtagaaaatatggaggtggtaggtggggtagtttgagaagccaagacgttttagggttcatacccactctgtgctatctccatcctccatgctctgtttggacagccagtacccactctagttacctcagcacttcagatcaggtgtcataaaaaggtgcaccacttttaaaaggttgctgacacccccatacactgcagttaacattattctaacttaatttaataggtgagcaagttaatggaaaacaatgaaatctggatcaagaaataagaatttataagaatcaaaatgtagtataaaattacatgatcaaagaaaacaaagtaaatccataaatgttcattcccaatgtttatttgatgtcccaaataaataaagtttaggaggatgaaatcatgccaataaaatccactctgaatttttttatacaactaattttttgcactgtaatttaggcagaaagaaaatgattttaaattaaaatttttaacacatataggtaattaaatttatgtggctattttctaagaaaatgtcttaagaggagttcaaggaaataaagtataaaatttcattaaatttaccttcattggaagaatatatgatgaaatagatttttaaagtttcctaaagaaactgttattctatctgacagaaccaaagtctttctttttttttccttctcttagattggcatgacctacaagaaaatacccatttatggtttccaaatgccaacatgtcgacatttctatattttttccatccttcatgcaagttttaaaatttacttgacaattaaactgcctaatttagaattttgcttgccaattgcaaattctttcgttgcacagatctatgaattaatcagaacaaagtagaaaagtgctagccatagtggaagaatttagtttaatttttcttcttggcaggaatatgtgttcaagtacattataagcagacaaaacatgtagctgaaaattttttggaagagctattaaactttccactataatgaaccagtgatgcttctaatatctcaaatagaattctattgatttggaacctgttctcatgttacttagcaggtcttcaaggtagataatgagttgtaattactatttcctttaaaaggacttggacaagatgagctgcagggtggtgacttcagaactggcatactatgctctatttttctttactcctctttgtactttgtgtccttttaaaatcatttgtattatcaactccattttagaataggtaataatataaagtagagaaatttacataaaatgaagatttccctttgtctcacatatattttcatccaaatttaactttctttccatttcaataaagtcccttttctttttttgacaaagaaggtaaaagtaatttttaaaggaaacatggaatctgttcccagtgtgtttatagattggcttaatagaaataatgcatagtttataaagcatctccatgaagatatcactgaacacaggacataggatttggactaacactaaacctgactaaactcttggctccactatgtatagctgagcgaccgtgggcaagtgttgtaatctctctgagctttggtttttgctaagaagtaaggccaataatacttggtgactaatcaagaggctgtaagtaaagcattttgcacagtccctggtatacagtaagaatttaataaacagaaactactattatcatccaggcagaagaataaatggagtacttaatccttttactaattcaagtgtgtgctaattgaaatctctaacacctcattaatgtggaatgacttgggagtttagtggttc

SEQ ID NO: 15 - DNA, 4625 bp, Homo sapiens
attttacaagccctgagacttaggaaaggtgttctgcaggggacagagggacttagcacttactgagtggttaccatataccatataccattccatgctatattatttagtcctcacaaccagaaaactgaaactctcagaggttgcaaggtgtccaaggacacagagctggtggtggcatcaggactcgagctgagggctcactcctgagttggtgcctctccctgactgcctgctgcctctctctctgaaatctctcctgctgcagcttcctggcactccctttgatcttctgtttcctttgtttacttgcagagttagtaaaaaatatttccaccttgctcactggaaatatttccagttcatcttccctttaactttaggttcattttcctaattctgatctttgtcaacctatgctgaagatttcatataccacatcaagtgcctgaacagaggtatttacatacctctgttccaatatgtgtgtgcacgttgtgtgtgcatatgtgtgtacacgttggaattgtgccatcataatgttatctcctggtttcctggtgttgtgatgatgttgttagtcattcatttgcctatccctcctttcctcatattctccctccctccctccctccatccattcaatatacaggaaagtagtctctctgttactatcctggctagtgagggttcaaatatgatcagaatattgcctttgccctggaaggagatgggaacctaagtagccacaataaactatgcaaaaatgatgaaatattaatatatactgtgctttaatgttaaccttttatgctttccttaagacatttgtaaatagccgttaagtataaattggataaatgggaaattataccaacagaatgtataaatatgcaaactgactccattgtcataattcattggcaaattggttcatggattgtttctgttctgcttggccatgagcttcttcacagaatgctgaaatgtgaagatctctatcaccaaggtgtctcttttctgaaaaccagcagattctctaactgaagtgctaaatttactgtatttttggcagaatttaattagaaactgaaagacctttcaaattgtatttagtctcctagaatattttgagcatctggtctgtaccaatcaagacttagggacactgtgatgattataacatggcatttgctggactggagcttgcagtctctacaaatgagctactaaagggtataaaaatataaaaagagatgagagaagaagggctttgtgtgggcagagcacgtgaaattggcaacttcagcaattaacatggatgggccagtttgtaaaatcagaattcttttctctatcaacacttttgaaggcttagagcatgctgggatcacaggcctgagccaccgcgcctggccgagcatgtcattaatgctcacttctctcaacccaatcccaaaaggaataaacattttttttctgcacttattatgaaagctgagaaaaaatcactttggatggccttgaatttattgacttgatgaaaacccatctagatataagtcttttttaataaagcaatggatgtacataattagtgcttgtatatatgtttataattatgtttgcaaaaaaccaatactcatgtgcctttgaggttgtacataagtttttctttttgacagttacccgtaagactgcaagatattgacactcttgggaatttgtggcttggaaggtgaatctcattccttgagagttagcctccatgctttcttttttgcttggtgaagaaaaagttccaactctcatagccctgagaaattatatttcttcctcctcacttgtctagttttatgagcttgtgactgttattcctatcaaatggaactcaagtgtgttgatggtagctaggaaaacagatgctaataaatcacttaaccaatcttaaaaatgcctgagccacatgacatgtcttcagatttacctaaatacatatgcacatgtcttttaaaaaataacttacctcatttcggaaagaattcaagttgttttacagaaagaaaatgccagtaaaatagttatatgatgtaattagcactgaaggatagggacagagaaatataagtttatattatcaatgttaatgagaagaaaatagttgtaaggactaacattaaatttccgcctcacttcgtgacaatgaggtagaagcagggagagctggtaagttgtaactctcagttttagatatggagcagtatgttggagctaccttacaaaggaattgcttttcctgggacatttgtgttaccaagagctacgaatgggtattgactgcttgacctaacagtctttatggcttctctgcagatgccctacacccttctgagtcagatttactaaatctgctttatttttagtgatgcagaagtttgagaaggttccagaatcaaaggtgatcttcgacgccaatgctcctgtggctgtcagatccaaagttcctgattctgagttccccgtgatgcagtgcttgacaggtgaggagtggtggggagatatgcactcagaagaaggtgtggaaataagctctgctgagagttgtcgagacaaaccaaatcaaaccattaaaactataatttaaaaacatactttatcaaaaacactataaatgaattgatttccagaatgcatattcaattcataacttaattgcagagttgacagtttatctactgtatgctatccacatggcacatgttaaggagtagaaatgaacaaaattagtttggcatagatctatgtgtccaggtcaggatctatatctccctattttaacagtggggccagagaggtggtaataaaggctgccatttattgagcaatgtatgtttacaaggattatctcacaatcccaaagccacccataaactggccattgctatcctgagttacagaagacaaaaatagttttaagagtgtaagtgacttgctcactgacatagaaccagcaaggggtcagggcttaaattcaaacccaaagtaacaacatcaaagcctgcagtctttttttgttttaaatgattttatctttggggtgcacgaaaatctcagactttaccactatacaattcatccatgtaactcaaaaccacttgcatcctaaaagctattgaaataaaaaatattaaaaaataatctcatctttgattttagatttagggggtgtgcatgcaggcttgttatatgggtatgtggtatactgccgaggcttggggtacgattgagtccctcacccaggtagtgagcgtagtcgcaatagttagttttacaaccctgtgctcctctctgtattccccccaagtagtccccagtgtctatttttgccattttaacactgcattatgcctgcctcagtacccacatgtgatgtagttattaagtaattaacactctgagtgtgaatctgttttggatatcagctttggttatggtgagcacactatagtttgtttcacaaacacagtgcaaggcatgaagtagaagctggaggaaatatttgtagaatgagagatattgacaggaatggagggacagaaccaagtggtcaaatgagtagatgtgaggaatcagcatgaggatggcagacttgagggacagctttggcagttatttgtctcaacagggattgtcatatacctgctcatgtgtgcgtgcactgtgacacagcttaagttagaagggcaggcagggcgtggtagctcacgcctctaatcccagcactttggagactgagcgggggtggatcacctgaggtcaggagttcgtgaccagcctggccaacatggtgaaaccccgtctctactaaaaatacaaaaaattagccaggcatgttggtgggtgcctgtaatcccagctactcaggaggctgaggcaggagaattgcttgaacctggtgggaggtggaggttgcagtgagccgagatcgctccattgcactccagcctgggcatcaagagtgaaactccgtcaaaaaaaaaaaaaaaggaagggcaaactggtgggatgggaagcaaaagaggatgcagaatcttagggagtgaggcaagcagggaaaacacgtccatctgttcatgtccagagatggtttagccaactgggccactgagttcagtgtctaaaatatgctgagagaaaacagacaacagttagaaaaaagagagccacatcaaggaggtccagcaagatgccatcctatcagacaaacgagagcagagcaatccaagacaagcagtatttgcaggttgagtacaggtccaggcaggcatccagcactgtgttagtctgtttgggctgctgggacaaaataccgtagactgggggacttaaacaacaaaatggattttcttgtaattctggaggccagaagtccaggatcaaggtgttggcagggttggttgcttctgaggcccctctcctgggcttgtaggtgactcacttctccctgtgacttcacttggtcttccctatgtatgtgtctgtatcctaatctttatttctcataaggacaccagtcctattgccttagggcccaccctaatgatctcattatgcacttaatttac

SEQ ID NO: 16 - DNA, 38128 bp, Homo sapiens
gcccctgggaggcagcccgagggagccccatagccttggctccaccccggagacacgtggctctcagaggtactcgcagcacccaggtgggagtgccgcccagtgcctcagtttccccagcactcaggcagagctgggaggacaaaagcagatccttttagcccatctgaaaaaaggaaaccagggcccaggaaactctgcagccctgcggcttgagcaatgtcctgtcactcattccccactgccaggaaacccgggcttctggggcctggcccacgcatggggcttctccagggtgaccttccctggggttccatgcagaagggtttgggggactcctgcagatggtgagtaaatggggtcggggctctgaggcagggcatgggttgaatgacttcgaggtcaggccaggggttccaatcctagctcccagccacctcctgtgtgcccctgggcaagttcccttccctctctgggcctcattactaatctgtgaggtaaaccttggagtggattcttagcgtatttgatcctgagggccccactcccaggatgggggagcagagagagggcttcctgccttcgtctctcaaaaatttgccttttcctccctagggacctatggccctagaactccctcagcattctcctccattgcaaacccggagagacaggtgaggctgggacagggtgggccgcacagggctctgccagggggctggcaaagccagcaggcaaagtcgggaagccacagggcctgggtagggccggggtgggggcttcccggggatctgtttctctgttcttgggctgaagggcccagggagggggagctgctggcggcaagctggcagaggcccctatagccaagggtccccagggcaaggggcagcagaaggagtgggggccacccccgtgacagcccctctgtcctcaggctgtggaactgacagcgttcaaagcttcaggtacagtccccacctcacggggtcccctcttttctttttgggcctggacaccccctaagccccccgtaccaggatggaagtgatttcaaattaatacgcccaacctcccgcaattgcagaggccctcccctcactccacaggtcccctgggagcactgggggcctggcggggaccaggcagtaccccttgggaggacttcattagagagtaggtcatggaaccctattctgagcgggcgctgccaagagcacaacctgcctccctctgtcctcccctctctctgcccaggggggcgctgccaaggagcacagcctgcctttctctgtcctccccctctttctgccccctaagcccagcaccccccgtcaccctctgaaggccccggcctgatgccctaggatccagagccttccaaacccgctgagggagaagtgctttcctccaaggctgcgggtcaccagctggacagctgatgggggcatgacgggggctgagcagtggcagggtgggtactgtgggagggtgaggacaccccagctccggctcagggagaggactgaagcctggggagctcagccgggcccaggggagccatgcggaccctgaccgctggccgcctccctgagggagcactccatctgaaacccacacgcctcagcctccgccaggtgactgtttccagcgaaggcaagagcgctgttcaccaggcccctcccaggggcaggttcagtgctcagcccaggcacccagtgattctgattcagagagggggagggggaggtgcctttctccacccattgcgcggatgaggaagttgaggcacagaaaggcgcagccgctagccagagcccgcacagagccagagccaggtccccactggcgcagatgggggactgcaggcacagcagtagccacgcgggtgtaaacgtagagccgcgtgaacccgggttgtgggatcccaggccccgaccagcccccatccccggctggcatctcggtcccggggagtctcagcttccctttctgcagaatgggctggaggcgccccccacaggcccgcccaggcgccccccggggccagcgcccctcccccacctgccccgcccccacccgcgggcgccgcggctgcaggaacaagagagcggcggcgcctctgcgctcaagtgacggcgcctttgtctccgctgaatgggtgcgttgctagggccgctcgtagcaacagagcagcttccacctgggccccaccctccggaccccccacccggcccggctctccggacgcccccgcttccagccccgaccccaccccgcgggccactcagcggcccgagctggaagcgcggggcagcggaggctgccgggctgtgtccttcgcggggccgccaccgcccctcctgaaaggccgcggagccctcagggcatgcggatgttccgaggatggagaagctgagactcacagcgaggacgggccagggtctccccaagcctcagttcccagagcccttccatccccgggttctccaccaggatcctctgccagcccagccccaagggcgcactttcccaccaggtttctagagagtggctgggaaactcgtcgccaaaccctgcccagctcagctctgctgggaccccagaccccagaacggcgcagcgggagtccctgagccccaacagcggccccagctcccgtggcctcagcctctggctttccctaaaggactgtgggcctcagccccctgttcccctagcccaccaggtccccaggctctttcccccagtctttgcctatctgtgatctgctccttcccccatgctccgaagttccaacgggctctgccgtgtctggtaataaataggactgttgggctctcctgtcctctgggagtcgtcctggcctgggcagagggaggggacgccaggccctctgggaggagggaggaaaccagagaagctgccacttggctttgggactccagggcctcagcctcatcatcagggtaggcgcagccagcatttatgagcgcttgctgtatccctggacggtgctgagccctttaccaccttagagtcatggatcctcaccgcagtcctgagccgccatcactcctgctgtgcagaggaggacacaggctcataccactcaggcctggggtctcccaggccctgtagcacagggggcaggggtgacggttggtgtgagtgggggccacccaggcagacagctcacaggtaagttgtgagtctggatacctccaagtcacaccatggaaccaggacctgctgccacagttgtgtggctgtgggcaaggtcgttctgaatcttggtctcttctcagtagaatgggtttcggagcagggaggggagcaaggatgtgagggctctgcaccaggcctggtgccagggtggaccccaaggctggcggcagggaaatgagggcccagactctgggagtgggggcacccaggcagccaacactgtcctgccgatgccagcctggctcacatcttgctggggccaggtgacaggtgacacagcatagccaggacctccaagcagctcccgggaggtggggcagggctgagtgagaagcagccgagacccagtgaggcacgcacagctcccagaggcctccagcttccacgctggaccctgcctgggttgagtccgggacaaaatctgtccagggtgctggccccacccacacaggtacagggcccaggtgcttcttgctgaggatggctgcgtagcctcacgatgccccatccgtcttctgtcgaatgggggacatcatactcacccagcgggtcatgtgaggggtccgcgcagtcctgcacttggttcctggcacggccctcagcaagcactcagagtgtcagctgtggcccgagacagatgttcggggctgtgggggccagagcctgtgccccagaggacgttcaaggccttgaaggcgccaggctggggaggcagtccagagagaagacagcatggctccgtggggccagcagagcccctgccctgtgctgggaacgctgggccaagtgcggcactctatcctcagcggggacaggaggggcgggacgctgaaggggcagcaaggaggcaggcagggcacttggtggccccccgaccacctacatctcagcatcttcaccttcaacaggctcctgtctcctcaaaaacccatcatatgggctgtggggaaggggacaaaggtgggaccaaggggtcctttcccatcccccacctccctccattccatatccctcttgtcccctatacacaccctctctttactctccagccagagtaacttctcctagatccccagacacggtggctgatacccctccatccttctgctcacactgttccctctgcctgaactgtccccagctcctatctagctggtgaactcctgggcatccttcaaaacccaatttggatgacacctctgctaaaaagtattcctgttccccagacccatctctcccaggagcagggtcaatcacttcctcaccttgtctgtctcaggcatatatgcagtatcacatcagactacagtctggtttaagatagtctccgcctacaagactggacattgcccagggcaggaactaaggcatctgcaggtgccaagaagaagagggacacctttttctttgcataaaagccactgccaaactgtgtgcctagggctgcatcacctgagagggaacacgtttttctaatttgcatgaagcatctggaggccgggggtgaccctggagaagaactagtcaagttagtcaaaatggatcaggacgatggagctttgtaccatggctgtgccgcttttagctgtgtgacctttggcaagctgcttgggccctctgtgcctcagtttcctcatctgtaacctacagaagtggcttcaaagagcagtcagtgtgcccagatgaggcgggaagcactaagcagggggcctggagtggaggaagcctcagatggcggcggtgctcactgccgccaccacgtggggctggggaggaacctgtgagggacgtggtggggcagacaggaaagggcagggctctgaggggtctggtctcccaggtctgtggctcatgggcccttggcaagtgccttcccctcctagagtataacccctgcctcacagggctgctgcggggacagtgagatgagggtggcacacagtaggtgccccttaaatggctgctccttctgccccaagatgggggctgagctggcatggccagcatgcaacaggcagagaggctacagcatccccctggcctcccagtgcctcagggtcccagggatgaggtgggtcccaaaccccaacagtgcctggtgtccccccacccggccccgccacccacctgcctcctcagagttttgaagcaaagagggtctgcgtgccacctccatccaagtcagagcgctgccccaacctagaccacccggaatccacccgggccgttctgctttggccccagaacgtacacaggcaaaggtagctggaaactaattgcgaaatttattccagggctgtgggggctggggtgatccttaagggcacttctcgtttcagggctgtgggtctccggccttggcaggggcacatgtttcagggggcggggaggggaggtactgagacagggtggcgggaggcgggaggcaggaggcaggggtgcccagtctcctccaactgggcaggctcagcacaagctgcaacagtaacatgaaagcgggacggacagcaggcaccccgccggggacaggagacagccgaggcctctccctggtgcttcaccctgcagagtgtccttcatgacctaggacagggggtcagggagctgagggccagcttcatgggtttgcagcaagggacccaacgggttggagccacagagaggggatcaacagcgctatccctgatctacaggcccgtgccccctcccaagttcacttgcattcccacccacagagacctgaagcccccaacagggcatcctgctgttcacctagtgggtggagggcgggcaacagcgcttctctggattggggctggggctcagaagtaatgacccagcaccaccccaagggtacttagtaggcgagtgtccggggagaaaccgtcagctgtacttagtggcaatccccaagccccagcttcagtcctcaaatctgtccccttccctccatcacacacacatttcaaggagtgtctagaagcttaaaaacaaaaagcggggagaaaaacctcttgactacaaccttgcagataaataccagcctgggagggccacctctgggtggggctaggatgtcgattgtaccaaacgttctccttgggtgggagagggaatcagtgatgcctggagcaaagttttttcccgatgatgtatcaatgccccctcttgcagaggtcaggtggggtagaagggctagggagaaggtctttttgtcctaaccagtctcctagtgtcctctagggcccaatagcccctctcaatttagcaaactcggttatccttagtttacaaaacagaggctctccctcctggtctctatggggggaacactggagaccctctctcctcccctagttgatacctgctcaacttctccctgtctgtttccaggagaggaggaagggatgacctctgatccaagggacgtcgaggcccaccagggaatcccgaacctcctccccggacctgcaggcttcagactccaggagagagagctgggagcagggagggggcggggcgggtggttaacagccacctccttggggcactccaagcagcaggcaagtgccagtggccactccacctccgccaggccctgcccagcctcacccaccttcccaaacacacagtgtcagaactcaggggcagcggcctctgggacggggctggggctcctcggtgggcatcagaaaatgaaccatgcggagccagcggtgtggctgcggccccgcccaggccccgcccccagtcccgcccccagtcccggccccgcccccggcccaggctcaagtctgcttggcttgcagcatttcgatgagcaggttgttgcggggcatctcgttgcccaggtgcttgtggtacaggtactccttggcctgcatgctcagggcccgcacctccaccaggcacagcagcagctgctggaatttgtccccgcagtgcgggtagtggcacagggtgtagtcaagcagggcggcgttggccttctcctgagcgtctttcaccaggatgtggttattcaggaacttcaaatctgcaaagggaggttctcggtcaccatcgcgtcaccatccatgcccatcagggctgggccaacaccgtcaccagcatcaccaataccaccttccctatgaccatcaaagacatgggcattgctgccaccaaccatgcaacatggtctccccgttggcaccgtgtcgccatcaccattgctgtcaccctggttgacaaacaccaccatcgtcaccaatacccacatgcctgtgtttttcatgaacatggccaccgccaccatcaaccacccaaccacagtcacctgtcaccatcatcactgccatcatcatcaccacagtggtcacaatgaacaagaattatgaagcccatcaccagcctccctcggggaggatccctgggcagttattgaacctctcggtcccccatctgtaaaatgggcgtgacgacagtaccaacttcacaaccttgtcctgagaatttagggagccgctgtgtggaaagtgctctgaagaacagtgtctggcacgtgagaagctcggtgggttgggttagctggcaccacaataatgccatcacaatgggagctgctctcaccgccgtcatggccaaccattgctgccataaccaacaccatccccctggcacgatcaaagccatcttgtctccatcatcactgatgcctcatctccatgaccgttgccatccgcatccccactctgccaccatcaccactgtcaccccatcagcaccacgcccacagaggcgcactgtgggtgggagtatcccatctcatgctgcaatgcaggaggactggtggccccattctagaggacagctggcatgtgcttttagtctcccctatgaccaacagacaggctccagtacccccaggaaggactctcatggggccatgggggagcatgcacattcactgcaggagtgcagatgcgctgacatcctggctaacctatcgcaagctgaaaatatcgtaagtcagaaggcatttactatgcctgacctgctgcacatcacagcctggcctaccttaaatgtgctcagaccacattaccctacagttggcaaaatcacctgacgcaagcctattttacaataaagcgttgaacatctcatggggtttactgaacaccatgctgaaaacgcaaaacagaagggttacatgggtactccaggcatgctttctgcggaatgcatgtttttcaacttctacaccaccgtaaagtcaaaaaatcctaagccaaagctcatgagtcaggggccatctctgctcatggtggcaaggagggggcctggatggccacgtggtgaccgcaccccaaggagtcgtgtgcaataggcagaagtcagggagcccacacaatgcagggcaaagcctgggactgagcggaaaacaaaaatcacagaagggaggtcaggatgagatcgataaggctcagccatgtacataaactagaaatgcttgttggccgggcgtagtggttcacacctgtcatcctagtagtttgggaggccaaggtaggtgggtcacttgaggtcaggagttcgagaccagcctggccaacatggtgaaaccccatctctactaaaaatacaaaaaaaattaccgaggcatggtggcgcgcacctgtaatcccagctacttgggaggttgaggctggtgaatcaggtgaacccgggaggtggtggttgctgtgagccgagattgcaccactgcattccagcctgggcaacagagcaagactctgtctctaaataaataaataaataaataaataaataaagcttgtacacaaagcagacgtgccatgggaagacaggggcaaacaggacgacccgcattaaacatcaaggaagggctccctttggggaggggtggagggggtttggctctgcgtgcaccaatgattgaacagaggagtgcaactgatgtgtccgccacacccgaggtgcagtgaagagacagaaagtaaaatgtctttggagtgagacagacgtggattcgaatcccagccgctgctgaggtgcaatgctacctgccccgccccgacttgaccagccttcctcctccctggagggggagagccagggtcagtttcttgtcacccaagttcctgtcacagcttgcaggcctctttcagctcctgggcagcatttctaggaggtgcccagcctgggggcacagggtcagcaggaacccacagaatctgtccccaggcctcaaattctagcctggccttgcctgggatggggtgaccagtggctcagaaaatggtcatccacccacttctcctccaccccatcacccccagccctgcagctgcgggggcgtccagaggcagcatgtgcagccctggccccctaatcccccttaacacccgctgcaccaggagagcgccacgctcctggcaaccctgatccctggccgcccccagcgcgcctgctgaggcctgtgttgtccaaagtcggatttagggaaaccggagctgggcccgggggtggacggcaggacctggcctccatcctcccagcccagcccaggctcctcaccctcccttctgaagcgagccaggagcactttcttcctcacttccccagggtcaccactaaccctgaaggcacctttatgccaattacatggaagttccccgttgtccagagagatgctgctatatccatcccaacgcctcctggcccaggtgctcttgtgcagtgaatgacctgcccaactgtatggaacagccctactccctagcctgggctgccccagacatattcaaaggtcatgggaagtcatgtcacctagctgagctcctgctggccccatccctgtcccatctgccttcgctccccaccatcctgggctgagcaagtctcctgacattctcttctgacaattcataatgggggtccggagggggacagggaccagctcaaggccacacatcagtaaagggtcctggaggaagcagctggagtggggaggaccggccaggataccgcagtaggggcaggggcgggagggggctggggaagaccagggcctcggctttaccgggatttactgttctcagcagcactgcgccagggacaccgaagcgggggtgcgggggtgggtgcagaaggaggacaggtttcagggatgcccccacccccagcagttctatggcttcccagctctcagcaggttggaaacccccgactgcccccagaggtcagccacagggccgggggagggaagcacagtcgctaacggagcctcagtggctacagtccagaagcccagacccagtttcccgggcaccccccaggcaccttgcacccagctcggttcatctcagcagacatccagacaggcagggcagtgcatccccagggctcagggaaccagggccccctcaagacacacaaggtgccagagcctggattcaaacccaagtctctctgacaccaaagcccaagtctcccatgataggcaagcaggactggggccccctgcccaggagctgggtcaagctgggatgcatgttcctgtgggattggacataactttatgtcccatgccatccatgagttctgtccgagatcccccacccctggggttctaggattcccccagagaggctactctggactctagacttgccttcctcctcatctggagaccttgtacaagtcactccccttccccaagcctccctgaacccccagtctctaaagagatcattgtgaagattccagcggataacacatgtgacggtgccagcaacgcacagaacaccacaccgttcttccagcagacacgggagcggggtcaaacaaacctggagacgcccccttcatgtgtcaggggttcagatcccggctttacaaccagctgggtgaccttgggcaagtcacttcccctctctgagctgcagtttcctgtcatctgcacaacaggggaaaattcatctctgcctcacagggtggcaaggagctggctctcatctgcatgcccagctctgggccctgggcgcccgaaggttggagaccggcatgttggagaggagcctgcgccccccaagcccgctcagctcccggcactcgcggaggtggaggtcggagggagctgggagatggagcccccacctcggagagcagcccgctagctctgcagagctgggggcccccaggttctcagaaaagcccccttttcatggtttaattgaatatttgaataatcctttcattccagcgaggcataaagaatgttgtcccaatagcggtaactcaggcaggcgcccccgcgcacaatggcccctcgagtggggctgctattcaggccgccttttgttggcgcggagcagtgggtaaattgcaaacgcttaagggaatgctgctgccgccgcctcaatggaagtcaggaaatcgaatgttaggtcaatccattaagcttcgattaagtcctcggcagaacaatgccagccgggcccatcttcataaataccgtgattgccaggagagaggcactaattttaattaaacctccttacctgcctccgcgccctcccgagacggctatttagacaccaaatggcacccttatgcggaggcaggcgcgaaggaggcgctgagtgagccgcagggcggtggggcaggtgggggagcacaagcactcgtggccaggctgtccggcccagggcggagccgcccccgagggggacgccctgcgcgccagctggaggtctgctggcaagtggcggtccctctccgggtcccagtttccctggagccccagctctggtggtctgggtgggatcaggagaggagacctctgctccagaccctggagtctgctccagcccagccccaggtctagcctctgccagggctctgggctgcctgcctgccatccttttcccatgctgcacttagaagggtcttgataaaatgcgaatttcatcatgttactgcctgcttaagggaaagttcaaggtaccaggccccggcattcaaggctttgcacagctcagctcctgtcccctcgccagcctactccccaccccgtccccacccctgcagccacacagaactttcaggattccccagaactttgtgcaagctgttccttgagtctggaaagctattagtgctgcttgtttttttttcacccagaatgctcctattcatactgctaggcccagctcagagcccccaccccccggaagccttcccggatagccaagtggtgctggtttctcccctctgacccaaccctgatcacactgaactgatggggttcctctcccaacctggaactggccagccaaaggcctctgcagccccctacatccctctctcactgcttgccatcagctggggtcctggaatctcctcctgttcctcctctggcacccccaacctcaccaggttcctggcctgctgggctcagggctcacccacccacatcagccagacccatgttcctgtgcccaaggataaggcactgtgccagacacaatgatacagatggagactgtgagctgcttcattcattcacttcattctttcacttacgcatatgcacattaacttaataatggtgattatgattaaaacaattccgacacacacttcccaggggtcagccaagcactgggacactttggggaattctcttatttaatccttgtaacaagttagggattactaggagggtcactctacagatgggggaaatagaagctcagagaggggagtgacttgcccaagggcacacagccagaaagagaccagagaccagatttagaatccactcctcatccccacctagttccctttcctaagcgctgtgccaccttgcttctgtcacacacacagcacgagtgcgcacgcacgcacccttctcccctcaactcagcctgttccagcccagcactggagcctctcccacctctcaggcctcagctgctgcatctggaaaaaaaggctgatgaccagcatgacatgagggtggggcacttccagttttgagcacgcccacacctggacccaagagaagagggctcagctctgccatcttccttaagtcccagagaaggagaagtcctggattcacccccggcagccgccagagctatgcacagggctttggtgggaagaggggctgggggccaagacaatgtccctgcccttcaggggacacccaaggacagacagagccctggcaaaggagcctgctggctgatagcccaccctccacctacccctccttaaggccctcccagtggccttgtgatggcagccaggtcaagaactctcaccttacaaaccacccggactcccgcggacacacactccaattctaggtgcctccaagcaccacccttccccacaaattactcatgttcccagatctcccggtccatccccagtcacacacaaactcttcacacaggctaacacttcagaaaccacaagcgtatgaaagttcatcgtttgcacatgccagcacgcacgcatgcagagacagacgttcacgtaattcctgcaggctccacgccccaaccacacagacccccaccacgcacatctgtgactctatcctgtgccagtctgctgagcctggcaggctgcggggaaggtgccgttgcgggcagaggtaggagggagcttccccagctgcagccaaccgagcctgggtccctgaggctcctgtaaggatttcaggccacagctcctaactggctgcccaagatcctacccgccccccaccccaatggctgtcccctgctgacccctgcagagccccggctggtgtcctgagaggtggcttaaggtggccttgcagataagccctccagttaccagcctgttctgccagaatcgggagacccagcccactgcacccagccacatggcatggaggatgtcaccaatcccacccaagcactgggcttcccacttttcgttaatcccctctgcctccacaacactccccactccccactcctccctctctctggcaggcatgcccctcgcagactgtgactataatgccagccaccaagacaataccttaatcctgccccctctccaggtgatgaagcactcactcatctctatcccatcccacctgcatcactgcaaaataattcattcccccagaaaactcctactcatcctccaaaaccctgctcagatgcccctcttccaggaagccttccagaaagagctctgctccccacccagggttccctaagccacacccatctctctgtctcagccctaaccacccaggctgtaggtcttttcacgattggcaagggacagctatgtcctcagcatctctgggcatggggagggcatttgtgatggctttccagggagtgagggtgcagactggagtggcccaggcagggttggggtcaggagggcaacgggaaggagaccccccaagtgcttggggagtgaggtgggtggccgggctgggctgggccaggcctgctctctgcctctcctctgctttcttttcctccttagcactggtcacaaccttcctggctatgcctgcctaatcgtgttaggaacctacgtcttactaatcatattatgctcatgatctgtctcccctagagaaggtcagtaccacaagggctgggcttggggggtttttgctcacagcggtattcccagtgccttctccagtgcaatttctcggtgcctgtttgtagagtcaatgaatggatgcacgtgtgcatgagcaaaggggtccaggcccccaggaggtacagtcaaaattggggccccctagatccagggattagagaaaacagggaccccaggatgggagcctggaataaaaatcctaaagtcacatgggccaccagagcgggagcagcccccatttaagagccaggccctggccgggggccctcagacctttgttcactgaatgagtaagggaggggtcctttctccccgaggctccttcgtggccactctggccacagcagggctacctctccagcctcacccaccctcccacccacccgcctctggctgtctccacctctctgtcactggagctgcactcacccaggctgaagaggatgatgaacttgaggcagacaaactcctgccggtccagctgcagcgcaagcagctgcagcaccagctcctgcgcccgcaacaccaggctgtgcagcagcgagcccgcctgggtggccactgtggtcagctccacctgggggcagagggcacggggcgggggacagtcagaggacgtgggtccgggcaggtggctctctgatgggggatgcagggctgagggcatggattggaggtgcaggtcagatgggctggcgtcaggagggcccagccttggtgccgagccaggcacgggtaacatctgcacagccccggggacgctgccgggcccacccttccgagctctcctcaacccgccaagcccggagctgaggcacccacgttctgcccgcgtccacccctccttcacacacaaaccccagcaccaggcccagcagcaccagcagctcagggggcccctctacatgctgggaggggaggggttggggagggcaggcctgtgtggggacacacagacacatccacatggcttcccagagcccccatgttcacacctacacgctgggtcacagctcagctcagagtcacacacacacacacacgagcacagtcatggggtcgcccactctgtgaagtgaaggcacacacgtgtgcacacggccacacccgcccttgtacgctcacactcacggcaacacatacacccatgtatgtgatcacatttacgggttgatgggaagacagtgacacccacacactgatgtgtgtggagattttgcacaataaaacacaggcaggcacacacacacacacacacaaacaggcattcccatggccacagagactcagccagcctgcggacacccacacttcatgcagactgcaggcacctgcgctcacagggagccccaaagacacccccctgggaccagtgctgcccgtcccgtcctcctgccccgatggcctgtgacaccgaggagagagctggagatgagcagtgggggcctgggagggctggagctgggagcagagtctgtcttccccaccccacagcacccaccgaccccacggcccttcctgtgtccccacctgagagtggcactcctgccagcaggctggaccctggccatcaacccccttctctgcctccccccctccctctctttccctacagcccatctctccaggtgagtcttcctccgtggctgtgcccccgtgtccccaccctggccccccacctcccatcctgacccctccgcctgcctcctcagataccacctggccatgtccctcctcctcctaaagctctccccggacccctgctgcatctggactttctactccccagatcctcattccctgctctaagggggcccaaattccgactctgagctctctggagccctttgcccattcattcattcattcattcattcgagatttagggcctgcaaggtttgcctgctaagccagcactagcaaccccctagcctccctcatctctcacctcatgccacccccacaccggcaccagcagggcccgggggctccacacttccaccctctctgagcctgcggtagacgtggggactgcccccctcatccctcattccccagccaactccagtgtgttatttccagacccagggccaccatcacctcctcctccatgagcctctcctcaccatgcccacaccccctgagctgctccccaagagcagggctcccaggggccggcgcctctcaagcctgggccagggctgctcacagagggtttgggccagtgggtgttccatgaacgtggggaaagggctgataattagggtgcccagagccagccccgagaggcctgggtcctcctctccggggccctgaatcctggaagtgcacagcggggccagggcggggcccaggggcggggccgagggactggtcacctcctgcccggtgaccagcaggatgctgccctccttgccgtgctggacctggcggtagatgtggtcgaacaccagcagctcgctccagcagttctgcagcagcgtcatctggtcggccacctggaaggaagaggcacgcggggggccgggctccagccagggtccagggaccttcctctcaccccttctcctcccactgagacccaactaggcgtgcagcctgggcaagctaacctctctgtgcccatctacccagatgtctaggctatcaaagtgcaacagaggtctggccagttaacaaagggatgtttgggggttgaatgggccaggcttcaggccccacctctgtcttttgtatgactttacgtaagtcctggtaacctttctgtgcctcagttttctcatctgtaaagtgggcaaagtactgagcggacagtccagtacatgttaggtatgccatacatgttagtgactaatgtccatgcaggtgctctgcaaaggactcctacaaatgcctggcaaggttattattaattttaaccttgtccacatttaaaagcctgtggtcggtcacacctctggcagccccaactgctcaaacaggagccatgagggagaaaccaagggcttcccccccgggcctacgcagagctctcaggctcaggaggaggagggaggtcccacctggcctgaggtcaggcccagggcatgagcaggggggcggcaatggcctggcacatgaagcagaaacgaacagcaacaaggggctgattccgaatgcccaggctgcggccagagacactcggtgcaggggcagggccagcccctgtttggagtgtcctttgactctgcaggactcagaagcagagccagggatcccctggccccaatccctatttttcagctgaggaatccgccacccggaaagggcaagagactctcccgggatcacacagaggcagggccaggccagggccacggctggcattcccggtccacaatctccactgtgacaaaacgagcccttctgggtatttggaagcacactgggcactgcagatgggcctgggcagacacagccccatccctctcagcccgtgccactcaccagctggccaccatcgacccaaaagacacttctggcgcaccttcctgggccgtgccctatggcaaatgcaaaccatgacagctgacagtcattccactgcagccctacagccctgcgagtttcgtatagtcgccacccacatgatagagagaagaaactgaacagagaggccacacagctctgtctagttccagatttgcgctcttaaccactaggtgtggaagaggacctctcactcaccctccttgccatccaggagttcctggtctctcacaggctccttgcctcctctacagatcctctacctgatccctctccttcctcgaggccctctccaccctctggatgcagaatctgcaacatctcatggcatcagttaaatgcctctgtcttcaccaatacctgtgaggtctggggaggcagaactggtgttcagctcttctctgggccccagagcagtggtcagaggggctgatgactggcaaggtgctccccaagacaagcacagagagcagagggaccactgcccacctggggccagagacacagagaggccactccccacctggggccagagactcagaggggccactcaccacctggggccagagactcagagagaccactccccactgggggccaggggctcagaagggccactccccacctggggccagaggcacacagagaccactctctacctgggaccagaggctcagagggactgctccccacctaggggcggcccccagtcagaggggaactgggccaagcctaatgaacagctctgtctcgtaggagatagaagcaccccgctctctgttccccttctctcctggggcgtccctggggcctgtgtcctcaggcagacagaaggggagaaaaggagagggagaagtcaggaactgcacacagacagacctccgggcccacgtggtggaaaagagggaggtctgtgtccattccctccatccacacctcacctctgggtccagagctccctccagctcccagcaaagctttcttcccagagcccctaccatcagccgtgtgcccccaggctcagccctgactgggagggtcccggagagactgaggcctgggcaggggctgactcggccatctctccgtatctctccttggaagtgccagcccccatggagccgcggtttccaggagggagccaaggctcagagggcacctatcaccaggcacggcgcccagtgtggcacaggacacctcacccctgccctgccgacattctgcccacattacagataaggaaacagaggcctgccggaggcaacactcgggcttcaggcagctgggctctgcccagaggttcctaccggccagacttctggggacctgagaacctcctgagacctgggaaggaggggcctgcccaggggtcacactggcagcaagaaaaactcaggcccaccgtagacacccaggtggtggtgcagggccaggcttgtccccccgcccctcgcaggcccacaggagcagacacgcttgcgcccagaacgaagacacaagggggtggggaggtggcggaggagcgataaggggtagaatgaggagataaggcttcaggccaaaagcagatgggtcacggtgacccggctggcccagccctgggagcaggctctgtacccagaccttagaccctggatggggcagccctgcccagtgaggctgataggggtgccaggggcacagagccacaatatggtcgctgaggctttggtgccccgtgccctgcattcgagcccccatccggccatgcatcctccaccctaatttcctgttttgtgaagcaggaaatgtaatttctctcttttttggttaaaacgtaagaacacacattgggatgtatgggaatcggtggacctgctgttggttcttacgtggatgctgcccggccgggatcccacctgccccttggccaagcaggtcttgtactcactgctttccttgggtggacagatggatgcataaagacaccaaactccaaaacactccccacacagatgagaatgcgcacacacacacacacacacacacaacctctttttatttaaaagaaaaccacagggccatagctgccagcccccctgcatgagaaagcaggtggctaagaggttcctttaaccagagagggttggttttcactttccgaagtttcctccctaagctaaaggctcctctaccctcaggcctccttgtcgccctgggaacaatgacatttgcagccccagcccttgggtctcccaccagcctggcctgtctgctgggcacatcagccatccacccctcccaccggaccgccacaaatcttcctggagccttgacgctctgcaggctgcctcagagacccggtatttatgggtgccaagctgacctccctcccagcagggcccctctggagccccctggggtccgattggtctggctgtgaaggccggtgggctgtgtaattctctggtggctgacacaccacgggctggccactgcgctctgccggcagagtggtcagtgaggtgtcatttgtcagcccaggactgacagttactgccgcttaaatgaaaccgtctatctgggcagttaaatctgctgtcagtgggggcctcggagctggatgttgagggtgaacggatgtcaaaatgggtcactgggcactcctggcccccaccgtccccccgggtcctcccttgcatcctcccagcctgtccttcgcagtaagtgacgagaggctgactgcctgggccctgggcactgctgcccaccaagcagcaggtacaggtgagtttcttccacctcacagggaaaaagttgctttataagcgcaggacaaagtgaccctcagacggtcccagaacaatcgtgtgctcagaggagcttgggtccaatgtgtctctccctgctgcctccccgccaaggcctgcataagcctgcaggcgtcgattaaacagtgtagctaaggggaagagaggaagggtgctgcgaccccacttccgaaactgcccgcgctcagttcttcccctgtccttactcactaaccctttaccacaatccaatggggtggacattatttcaactcctcccattttcaagacgaggaaactgaggcccggaggagtgaagtcacttgcccaaaatcatacagcatgtaagtgacagagctggaacttgacaacaggcctctctgattctagtctttgatattcacttctgtgctactatcgaatctaccatgctgggattggtgtgagatggaaacatggagacggagggacccccataccagctgggaaagaagatgggggaggaagaccccaagagggcatttggagctcagcatcggacacaactgggcccctggcacccctgagagctcagctgagactccaggactcctcccgagcagcaagatgtcatcagcatcagagggctgagtgggcctctgctcagagcccaagctctgtcaggggagcccctccctgacccggaacctggagccccagccagccccgcagccatccatcacccactgcccaaggacccactcctgctccaggctctgctctggccctgccaacctctccagccctgcttcacaggcccattggaactcccggaacacgatgcctcttcacatttcgggaccttcgcctctgctgtgcccactgcctggaattccctgaaccttctctactttctagaaaggcacagaactgttctccgacttccttagttagagctgtttgctctccccccagggtcccctctgccccttccgtggctctcagagccctgggcacctcgcactggcattatctaagtgcatgtctgacttctcctccaggctggcagcttcctgggtccagatgattttaatgtccccagtgtccagcccaagggctgctccactctcagagccagagagccccctcttctgtctgctaagatgtgtcctgtctggaggtggggaaatgaatgatcagctagaagagacgccggagtcacccacacccctcccacttttctgtctcctcacctctggactttgcaaagagacaccagcccagggtccactggaccagtggaaaagaacttccacatggcttacgagaggcgctctaagggctgggctggtacttatctgcaaggcccctttagagaagctggtgaccactgctcataatcccgggctcaattcaaagactttgagaaggggaagcaggaaggtttggaccacggagaagccagaagcaggaaaaaacactcagcaaagctgggacaaaagcccttcccatcctgcgtgaaaatccccgggagactaggaaggcagccagaggaagtgccctgcccctcaatccagggttctggaaggccgggaatgccctgctcctcctcccctctgcacggggggtgcatgggaagtctggagggaagctagcaaccaacccaagatgcttggggtcctcatccccaccagggcctccagccatgagcagaaggcaggtgggagtattcaagaccctgccttttgcctcatccattaggtcggaccagagaggcgggcagtgttgagaaggggctggggtgagaaacccaccccatgacagacacatggtacatccccaggcctcagccatgacaggcgctccacggtggaagccgtagccaccaccatcaatcctcgactcccagatggcccaggccccagtcccgcgatgcccctagggctcggagcacccacccccacctaccagccagggcaggcagtgcccccagcccatccggcctcatgcccctggaggaagcccaggcccgagtggcgtcagcattgacaatgctgctcaaggctgcagtggccccagcagtgggggcaacgggccctgctgtttacacccagccccagaacagccagggggtcagcctgggaaagctaaacaccaatagccctgggtgaaagagtgcctgaacccaggccagggaggggcaggccttggtcagctggaggggcctctagggaggtctcagagagccagggcactggaggggcagttctggggcctcaggctcttcaagccactaggtgggaagactgggaagttctttcctatgtctagcctcagtttctcctgctgctttcctgattactgtagcatcaggtacctcgacccagggggaaagaaggccatgccatagaggaaggctgcctcgccagggaagatcagtggcagaccctggaatcccccacccacctacctatctagcttcctgaacacccacacacatgcacatgaccatccagcatacgcaagatttgcagaggcaggaggatctttcaccttagctgggaaggagaatggcccacaaatgccccaaactctaaaacactaagagcccccatctgtgtgtgacactgccaatccttgccagcctccctgaatgggaggacaggatgggccggacccccttcccaacactaggctgaagcctggggaggcaagacagtctcccaaggactcagctagtcctttgagggagcccagggtctcagagaatgagggaaatgagtactgagagagccccagaatagggaaccccagaggctgaaggggttgcagagacaccaagaagcagagagacaacatgcaagggagagacacagtaggaagagacagaggcagagatcaaagcagcagtggctccttgagcagaggctcaaggaggagagaaggagagggagggagcggggacccaggaggctgtgataagtggaaatgctccttaatgtccccagggtggcctccgggtccccaggtactgcctgaagccagtgggaaggatggccctatccaaaggacagtcgggctaaggcttgggcagccgggaggaccatgatgcagggccagccgggcgggaggagagactcacctccagctccttgaagaccatgcacctgcgtgcccagtccacgatggagatgaaggtctggtcggccattctgcacaggaggccgaaggccgccggctggtcggggcggcttttggtgggctcctgcaggcagcccaagatgcgggcccgcacctggtcctcatccggctccagctgcagcagctgcaggatgagctcaggcacgttgggccctccagagaagggctctgggtagccgtacggcagcccaggctgtggggggctggcataaggctccgggtactcagacttgatggcacggccaggaaaggcagggtagaggtagccagccagtggcccgtgggcaccgggcacggccatgggcagtgctggggccccaaagtcgcccagtggcccagcaggtggaccggcggccaggcccttgggctcaggcccatgcaggctgggaggcagcacgtagtccggtgcgggagggggcggcgggggcacccccatcgggggccctgtctccagcttgaagccattggcccgaatctgtgccttcttctgctgtttcagggcccggtcccgcttgtacatcggcccaaacttgttccggccacccctcatacggtcagcgcgcacggctgtgggcaggggcagagggtcagactcaccctctctaagcccccttccatgctgccccaccacagatcctttccaaacaaatctgaccgctctctcccctgctcaacaccctttcatggctcccactgaccacaggggaagtcagtctcctttgcctggcattcaaggccctgctcagcttttcaggcaatccctgctaagacccctctccttccactccaccgaactcacctccactcctctgtttgacacatctccttcctcctccaccctgcctttcattttccttctgactcaaacttttttttttctcttgtgcttgctgaacacccagcctcaatgtcactacttccaggaagcactcctggattcatgcaaacgggctctactgtccttgccccaggtgccctgtccttgcccactcttatcatgctgagtggatcatgccatgtgctcctgcgggctaagttctgggctcaggtgtctagcataaggcctggcagggagatggtgaccggaaggggaccctggtcagccttgttcaccgctggccccagggtccagctgtttgttgactgactgcctgactgttgagctcctgcttcaaaatgactcaagtatccttcactggctgcgaatgtgaagccaagtttagagctggccaaggctctatgctgggggaggggacctctcttgccgactagaagctcctccgcctggcgaggaatgtgtcatcagccagacccaacaggtacatctctgcagctggagtgtgccccccgcccctgctcagacagggccccaccctgggatctgggcgaggggaaagagcaggagagagggggtggtggtgctcagcagggatgatggctggggggctgcctggccaatcttcctgccccctggggtgggcagcgctgtgctgctcgcaggctgcacgggagtttctactgcccacaacagccagctatctggccccttgggacctggcactaggggcatgggctctggggacaggacaggatgtcccctctcccatccaggagtcctttctccaggtggcagggcatgtggtccaccactctcagagccacctggggctttctacactgttccaagaccttaatcaaccactgcctgttcagcacacagtccagtgaccggccacctccagaagctcaaatctttcctgccaaaacttacctcctcctctctgggctgagagctggggttgagggtagggaggcaaagaggggcctgggtttcttgggggcaattcaattgtcccccactgcccggccccctcagggcctggctaagaacatgacgggaaggaatctcactggctgagccaataaaccagagagccctttggatggacggacagacaagcagatgggcagctgaatgtgtgggggctgggcggtggtggtgggcagatcctaatggaaagcgtgatgggcttgacagctaacctgcggcaatgaacgcctaggcaccttcagcttgcctgcaccgatccccacactcactcactggaggaaggcgctgccgttaagcccatttttcttttctttctttctctttctgccttttcttttctttcttttttatttttatgtacttattttttgagacagggtttccctctcgcccaggctggagtggagtggtgtgatcatagctcactgcagcctcgactttccaggctcaagtgatccccccacctcagcctcctgagtagctaggactacaggcacatgtcaccacgcccagctacttttttatattttatagatacaaggtttctccatgttgcccaggctggtcttaaacttctgggctcaagtgatcctcttgcctcagcctcccaaatgctggaattacaggcatgagccgctccatccggccaagcccatgtttcacatgggaaatctgcggtttagagaggttaaggattttgcccaatgtcacccagcctgactgacagtgcgggcactgggacttggcctctgctggctggggttgggtattttgggggcatggggacctcctcacagagggaggagctctgccgaccctgtgctggggccctggcaggggctggggaaagagtcatctccatagggttcacttttggatacttctcagcccaacccaggctggccttgccagcgtcccttccccgcccgaggcccacccagcgccagcgcccggttctcttgcagcgactgggccctaatgtcgcacgaggggccttcgcgaaggccaatggtactatcccctcagcccctctcccacccccaccccctaccccctcaggctgtggggggtcaggggtcgaggcccgcgcggcgcgcaccttccaggcgcatccccaccgtcaggcatttctggaagcggcagaagggacagcgcttgcgctgcgtcttgtcgatcttgcagctctggctctcggtgcacgtgtagtgcttgttgttctgcaccgtgcgcttgaagaagccctgcgggagctgagagtcagcgaggccccgcagcgcccgtctgccgcacccctgccgcgcgctcgccgctcaccttgcagctctcacacgtgagcagtccgtagtggtagccggacaccttgtccccgcacacggggcacagctcgtccaggtcctcgtcgtacgaatagtccatgcccgcggcgtccgcctgcggagggacagcgggtcagggagggccggcggagaccggcagcctggggtccccgcggccgccgccccagccgctgtcgccggcccgtcgcgtaatcccctctctgtgcccaggcgctgccgccggcacccaccgagcgccccgcgcagcgtcccggggtgggtccggtgcagtccccgcgcccggccttcccctgccaggccccacgctcccgccccgtccggggggctcctcccgcgcggaccccgtcgcgcccgatctggggccctcgggttcgatgcgcttcgattgggattcgtttgtctgagaacaaaaccccgattctgagaaaaagagatgggctcagccgcggggaagacgccaggggacccaggagcgctggggcgcccggcccgggtgttctgggaacccgacagagacgaaggaggcagagacagagtccgggggagccagagatgggaagaaactctggcgagagacaacgaccgacgccaccgggcgcagacacgaggccagtccgagagtgccagagacacagacactgagacgcccagctagagagaacccggcggggacgagacacagggagggatggagagagacagggagacagagagagagagagagagagagagagacgagagagagagagagagagagaaacgaggggtgggggattggatcagagactcggagagacagcggaggcccgaagagaaaacccaagagagactgacgcagagccagagacacaacgatagacgacagacagagacgccgagacgagaggagccccggagagacgaggccggggagctacagaaacacggagagaaaacctggaggcggaagcgcccagcccgagggtcggggacaggggacgcgcggaaacctgccgggcaggagcccaagcgccaaggcgaggccccgcagggtcggacccagacgggggcccgggccgcaggaggcggaaaacgacggcgccgggaccgagagcccgaaaacgcagagccgccgggaccccctccccgggggagacaaagccgcagcagcgacggcaacgggaggcgcagcccgagccgccgctgccaccgggacgtcgggcggggagacctcgggcgggggtcggcgggctccgggaagccgagcccgaggcgagggagcgacctcgggcggagaggcgaagtccggaggagggaagcgcgaagagccagggcccgggacgcgagagggggcgcgacggcggctgcggtcggcccggcgcccacctggtcgctcctgcgagcagcgccccgcgtcccgcccgcgcggagcccgcacctctcggccgcgccgccgccgccggcgaggagccgcacccgggcgcagcgccgcccgcccgcgatgacggccgctcgggccggggacggggaggcgggggcgcggggctggcggcgcgggggcctcggctcccccctcccgcctccccgccccccatcctgcctccctgttcccccccgcaccgccgccggggccgctccgaggcgcacctgggacccgggcccctcagccgccaccccgccctgcgccaacccgccgcgccggggccgggggccggcccctctatatcggcgcgtgcggtatccgggggcggaggcccggtcgtgtcctccccccaagcccggcccgcgccggcaccctctccgcagtccagctcgagtcttcgccctcatcctccaggccccccagccgcagcccggctccccggaccccgagcgcggccagagagctgcggagcccgagtgccccgcgatctgggcaggtatagggcagtgggggccttgggtcacccgcctgcagtgggaggaggcagctcctgtctgtgaacccagctgggtcgtggcgaatgccacgcgggtggctggtcgcactacagcgtggaagtgggtaagggcgagtggcgaccgtggccgaggctcggattcacgggtggaagccagattctcccatggggcccaccacatctcctcactcgagcctgtagcagctctctccccgtctcgggtcttcagttgccgcatctgtgaagtgggtagatgaccgctcttcctcgctaagggtgggtcgtgaggatgaacccaagcagtaggggcaaagcacgcgtgtggcctggcggaagcgctcagtggcgcccctctggggagatctggggcgaaccccttctgctcgctagcctcaggtcgctgggctggaaatgggactcgtggaaatcccattttacaaatgtccgaggcctggggggacccgaagcctctacgggcgcaggagctgggagaggagcccggaggcagggccccgctgctcccctcggagctctcacgggggggtggggcgaggaagaaagcgctgggcggtcttggggacaaaggggttcccgggcctatgggccaagcagttgctctgggctagggaccatccgcggggccactgtttttcagctggagaaacggacccgaaaggaaggggcctgcttgcatcctgcctccgcccccgctggcacctggggtcagagagagtttggggaccatgaggccaaaaagctgcgatcttcaagcaggaaaataccgcaattttgcattgacagcggcgcaacccaccaaaaggctccatctgggctcccgcccgcctggaggcctcgggcttcggttggagctgggcctggggcctgcaagttgtggccagagaaccccccgcgcagaccgcactcagctggctcacccacagaaggagcagaacccgcagactagctgtgcaagctcgggcaagtcacttctcctctctgaaacgagagcctcagttttctccgagcataaagtggaacatgttggctttacagatggggtactgcggtttccatgcaagaatcttggatgaggagggaagaaagagccagagaccctgttaatcgtaccccccgcacccccaaacccctgagaaacaagagcatctgcccgagctggaggtgggggtcactgccgcctctgaacagctccccaccacaatggagccctcagacagtgactgcaggagggaagggggttggtggatgatgggctggggtgccccagttggctgttctaaggtagagctcacccgaggtctcctggaaacctggagctggacacacaggccccagccgccggggttgggtgggggctgggctcaggcccttctccctctatctccaatcccctctccccaagggtttctactctcaccggctggaagcccatggctcctctgcactccaggctccgaggcacccacccccacaggttccaggttccagcccaccgcctggggagttccagcccctcatccacccacccagggagggaagcctagacctggcccggccgcagaacccaggctgacagatggatgccggagacagacacacggatacacagcaagactcagagagagccacagagacaacacagaaactcaggtgggggacagagccccaagacaggcccagagccctccagacacactcacagacctctaggctcagacccacacagcctggtggatgcctggccagagacagcgggacaccagcggacctccatggggcttgtggtcacaggcctggctcctcccatcggcagcccagggaagaagagggggtagcatggtgggagggtgagtctgggagacccctggcaccttccctgcccagagcagggggcaccggtcactaagtggagcaggcagtggccggcccaggctgcagggaggcactgcagaaggaggctggccattagaggcctgggccaaggccctcacttacgaagcggaagcagcgctctcacaccggatgagggtggcagtgggcaccaggggtccagggggaggctccggcagcccaggtgggacggtggcgactgtgggtgcgcagaaaccccctcacaccacggcgggcggcagccggacagcaggctggccctgtccgtccgtcctcctcctcctccccgccctggtgggggggccaccggaggcccaattggtctctgcccccacgtgactctgcaggcctctcgccttctttgttggtgtttctcttcatttacgtctattttttcttcttctcctaaaagaaaaaaaatacccctatctatctgggggctgagggtgggggcggaggccaaggcactgcagaggccttggccagctggctgttccaggcccgctgtgggagcccagaggcagggaccccacagaggcgggtaggcagccccgcttgttagaaaccgggtgggagtggggcttgatttatgggctgctcccccacccggcctgccgcctgctcctctctccttgtgaatggctacctccctggggcctggcctggcatggtctggcccagcccggacattggagtagagtcaggacaggccagtgcggaggcaaggccatggcgacttgactaggcggcctgctgcttccacctctttttcctcttccatcaggtggaagaagaggggggccggaaggggagcaggtgagcggcctggacacctggtgcgtgcatgccacggtggcctctgaatgtcctcatctgctgtgggctgctgatgttcccagtcgatggctggaaaaactgaggctgggctgagactgcctctgaggccaagtggtggctatagtggccccaggttgaaccaagtatgaagctagtccaggataggacagggtagcaggaaggggcccttatctagaaggctaggcctccctagacaacctgggacgtccccatccaatctctgggcccagatgggctctgaaatatcctgttcctgtagggcccgggttgcagggtgttgtgccgctcccacggtgactggatcttttgtgtgttcctctgtttgtctcacatttactgagcgcacacttaggggtcaggcactgttccaggcaccagggatcccataggaaagagaagaaaagtctctgtcctcagaggatttacctccgtgcctttcatcttgggagagcagggaggggcacagggtgactatggggcagtcactgttgagaaccacccctcctcccacatatcccttcattggaggaaataaataaatcacacccaacacctcacttatctggaacaagagggacttttctggataagtgaagtgaagccaactctccctatatatattttttcatggaaggccactgaaaaagtagaaacgccaactatatttaaaacctatgtgttttccagccagtcactgtggctcatgcctgtaatcccagcactttgggaggccaaggtgggcggatcacctgaggtcaagaagttcaagacaagcctggccaacatggcaaaacgccatctctactaaaaaatagaaaaattcacctggtgtggtggcttgtgcctgtagtcccagctacttgggaagctgaggcaggaggatcgcttgaacctgggaggcagaggttgcagtgagccaagattgtgctactgcagtccagcctgggcgacagagtgagactccgtctcaaataaaataaaataaaataaaataaaataaaataaaataaaataaaacctagtgtgtgttttcctcattatgccacttaaaattgtgtgtgaacatacaacaataatactgatagactgtagtcccggctactcgggaggctgaggcaggaggatggtttgaacccaggagttggagctgcagtgagctatgattgtgccactgcactctagcccgggcaatagggttttaataattaataatcattaattcaataataataatttttataatataatttcaccaacagtcatagctaactgatcgaatatattccacctacaacgtaacagacaacttattcctcaatgtgcatgaccttgtaattatgtctttttcacctagagaagttcttacaagatatacttctcttgcatatggctgaacctaactagtctccctattttaatattctttttttagtgtccctattttgttttatgtcttttgagacagggtcttgctctgttactcagactggagtgcagtggtaccatcatagctcactgtagcctcgacctcctgggctcaagcaatcctcctccctcagtctcctgaatagctgagactacaggcacatgccaccacacctggctaagttttgtattttcttttgtagagatggggtttcgccatgctgcccaggctagtcttgaactcctgggctcaagaaatcggccgcctcggcctcccaaagtgctgagattacaggcgtaagccacagcacctggccttagtgtccctattttttttttttttttttttttttgagatggagtctcactttgttgcccaggctggagtgcagtggcacaatttcagctcactgcaacctccgcctcctgggttcaagcaattctcctgtctcagcctcccaagtagctgggattacaggcacccgccaccgcacccggctaatttttgtatttttagtagagacagggtttcatcattttggccgcactggtctcaaactcctgacctcaggtgatccacccacctcagcctccccaagtgctgggattacaggtgtgagccaccgcacctagcctagtgtccctattttaatgcaatgattttgtttctggactaatatcactcaccctctgaatttaataagaaatatcccagcaagtccaggcgcagtggctcacgcctgtaattccagcactttgggaggccgaggcgggcggatcaggaggtcaggagatcgaggccatcctggctaacacggtgagaccccgtctctactaaaaatacaaaaatcagctgggcctggtggcgggcgcctgtagtcccagctactccagaggctgaggcaggagaatggcgtgaacccaggaggcggagcttgcagtgagccaagattgcaccactgcactccaggctggcaacagagcaagactctgtctcaaaaaaaaaaaaaaaaaaaaaaaaaaaaaaaatatatatatatatatatatatatatatatatatatatacacacacacacacacacacacatatcccagcaaatacccaccactaacatgtcacatacatgtaacaataacaaaatcatgaatctttgcacctcatttaataggcgaccttatgaagtggggtctgctttgtccgccttcttaaacaagacaaacaggtctctctccacaccatgacgccatagaaggaaccagcctggctttgtcctagtctcctggtgagtccttgagccctgagaaggagaattgctggcagagtctctggattaaatcccagttctaccactttctagctgtgtgacctgggaccagtcacttcccctctctgggccttctctcttctctataaaatggggatgaaaggagacaatacgtgtaatgtattcagtggctggctggtatgtcatgtgtgctcaataagtgtcagcaaaacacaaacaaacaaccagctgaaggactggatgatctgtcctcagaggccctttccctgttgagtatgagattgcaacatcatcatggacaccgtttgcccttctgtgatgagcgcctcacctcagcctggggaagcctccaggaaaggcctgatttatctctgggtccacagcagcctgcgtggagcaagcgttggaacttgctgaatgaccactttcctccgcacttgtaggtagagctctgctgcctgctccatgggtcctgtctcctctgacggcatcagttgtcactcaaggctgggtgctcctcatcccctaaccaaccctggccacagtcactggtacccccttcctctgtgctgccccctcccaccctcagccaaagtgggtgctctatggggacaggggcagccaggggttaccagcgtgctgggaatggcaaggccccaactcagaagtgcccccctatgtgccaggtccccagctaaccactccacacctgcagtcagtctcgaacctctccggcattctgggaggtaggtagtaattccctctcaacccccgatagcagcagttaagagaggaggaaagtcaggcttagagagaccaggcatcttcccaaagtcaccaggcgagggtgtgatgggaccagcgttcaaatcccagcagtggagtccagagcccaggcctgcaggctgactcctctccaccctgccagagcccctgggtggcctgtcctttccttcaagctctagccctggtggtcccaggccactagacctacccagaggggaaagcaaaggagggctgtagtcctgactcaggcgcccccaacctccctccccaggcaaacaaagcccagggtctctctcctaactggggactttcccaaagtgccaggcccatttcctggaggtgggataaggaacaaacaaaccagaggcccagaaactgaaacagagagagggacagaatcatcaggctgcagagtggaaaggtggccagaaaaagagagagaagctgcagaggcttgggcagaaaatatgaacacagagagaaaggggagacgcagtcggagggagggaggatgacagagaaattcagagtggtgagggttggggagagaagaaatgagagcgagaagaaatgaggaagagagagagagtagggatgagagagattcagacggagagagagagactgaggcagagaacgagaagcgggaagggccgaggcctggagagctggaggtggagggagggtggatgtggagaccccgtgcagggcagcggagggggcgggcctgctggcggcagcagaggctgtttccgctgcaccccttatcagcctgctgccagatgttcagatccgatgccaatgtcagagaagtccatagtgctgggtcaaggccgtggccagcgggagcctcagctgcagtgtggggaggggggctaggggcctgcaatagacctgctcgctcttccccctctgcctggtggctctctgggctggaccacctcgtggggatgggaaaggccaggtgcccctggggccagttctctagactgagagcagggacttgtggaggcagattggggctcctggcaacacgtggacacatacatctttgcacattcgagaaagcacatggacacacactcaggcacatgagtgcacagtgccacatggggacagctcacagagtgaagagctgcgcccccacagctctcctcagcaccccacagcctgctagagcccctgctctgcgtgttcagcttagggcccctacccccccgacctctctcctgacccaggactgcagcccgcactggagaagcaagataggagcctctttgtggctggtactattcctagggcccacactgctcttctgtgaactggatgcacccagaacctgctgccccaagggctgggcagaggacctgggacccttagaacatgaggcctgggggagcccccgtaggaggtgcagaaggtggcatctggcagagctgggctccagccttgggtctggcctctccaccaggctcctggagcgtgcagtgcagctggggcccccagcctggggtagcttatctctcggtgcacacgcttggccctcaaggggtgacccagccttgctccccacattccacttcagccacgcagccggtgggcgcccccacagccccgagacagggcctgtgcttggagggtggtcagaagccatcatgctgcaccaccccctgctctcggctccagccctgcacagccatctctggtgtctcttcgcttgtctctgctttcatctctgtcacgatgaatctgtcactgtcggtatcttaatcatgttctaatttgtttctctctgctattttcagccgcctagtctgtttttcttttctctctctggggtccttgaatggggccacatctaaggatactgacacttttctttctagctcacagtggccagctgagtgggaatgtctatgagaactcgggcttgggtgagggacaaagggcttcagaaagcagagaccttggaactgtagtgggtgagctggggcagcccagggagcccaaattcaggccccctcccacccactgctaggagtcagcctggatgatggacactgatagggcctggtgctggagggctcccccatgtagtggagaagcctgggggtggcagcaatggggaggaagctggggctggaggtctcccagcctgagagcctccttcctgtttgtagggaagtcactgcctcacaaacctgctagcgggagaaaagggaggccatggggacttccgggaagctggccaagggccccaggctaccctccctgtgcccacaaggggccctctggccctggcttaaaatagtacagttcctcctgtaatggtgctgggcccagcccagacctcagagggctgctggctg

SEQ ID NO: 17 - DNA, 409541 bp, Homo sapiens
aattccagggagaaaaagactacttgcattcaatgccaacagacagtctccataatatcactactatgaaaatgtatcgatacaaaactaccaccacattgtggacttaaaagaaatttggattttaacaagttaaacttaagctgaactcacatcatttatcatcaggcaaccagtattctctaatatcaggtatcacattatagtataattactgaataaaagacaaggaagaatcctgaagatgaaatttaaaagtgaatttctggatctgtaagaaaggtgaatttcccagtaaatgcaggagactccatgagcagtgcaaattagtctgttacacaccattttaaaacatataatccatacaggaattccaactggttaacaaattccataaagaaatgaaagttgtctctatgaagagggcacaatgaagcaccagaaatatgataaccataagctttatttaactataattttctatattaacaagctcctttcctatttatctaaatcaaatggcttttattccacaccaataacctgcaaatatgactgccttggactcacaactcacccctaaggaatctgccttatgtttggaatcttattttcactgcattaaagcagtacagaaaaaacattaccatatatatgacaaggaataagaagattcacaaacgtaaggatagcataaactcattgttcaggaatgtgattggttaccccatctaacagtctggtgaaaagtgcccagggaaatgaacacacaacacagaaatacagtcagaaaatgaagaggtagccaatgtcccgttcccacccccacaaaactccaggatttcttgatagaatgaatgtctgcattactattttttttttaagatttctctgtattaaggattccataaactcgttattcagctcattccaatgcctggcccaactggatatactactaacttaagcctaggtgcaaatcagtgttttgtttttgtttttgtttttgtttttggagacagggtctggctctgtcgtccaggttggagcacactggcgcaaatctcggctcactgcaacttctgcctctcgggctccagtgattctcgtgcctcagcctcccgatccgctgggactacaggggcgcgccaccatgcccggctaatttttattttttgtatttttggtagagaaaaggtttcgccatgttgcccaggctggtctccaactcctgagttcaagcgatccgcctgcctcagcatccgaaagtgctgggattacagatgtgagccaccacgccaggccaaattagtattattcttttaagaaccgaagaaggctcaggttgaaaatttttaattaaaaaaaaaaaagaaaaaaggtttccttgtttttaaatattttaatggaaacatatgagtcagatttcaaaaagtaggctaacggtgtttaaatactgtgccagtgtatttgagaagctgaatgaaaacaaaagtacctatattttaaaaataaatacaatacaaataaggaaaagttcattctacgatttcaatttatcaatcaagctacatggtaaagagaatcatttcaattgtttttcacctccacagcagtgtttgaggttggtaggctctcccaggaagcttggaatcttaagcaactctcaattagccctcaatttctctattttaaattaatctgctgacctgttgtgggtaaacatccataaattctgccctggctgagaaacatttaactttttcgtctaggatgaatgtgtgggtgtgtgtttgtaagggaggggtaactccttttgaccaaagtgttgatggttttctaagtaaatacttgctatccacaagaattttttttttcgtttatgctgctttttctccctttctgcactataaaggctggccttccaattcctgccccgacccttcaccgtgatccaatcccacaaggttcccctaatttctgctccgggtggcacctgacggccaaaagtgaacccctgcggttgtcgccagctagacgcggatagggcggacgactgtcaccggggagcaggcgtgggccaaagccgaggtgatttctgactgctcactggcgggcctcgcgtggctgaaggtctccgagcccctcggttcgccccggcaagccagaagtgcagctgtcgcggggcaggaagctaatcgcggcccctgcgccgctttgacaggccgagtgaagagaaaacgggctcactgcagctaacagcctcaccccttgggctaggaagccacggaagcaaaacctccgccccggcctgaaagcaaccgggagaccgcggaaccactgccaccgactcagccctgcccagcaggggcccgcccaggggccactccccaagggaggcagccagtcactcgcccgcccttccgggcccactcccgaggggacggtctcccgcccgccctcacacacagctagctcttcaggccaggcccccagggtttcgtccacctctcacctttgacgacgcggtcagccccgggagggggcggcgggggcgggggtgggggcggtgcagcccgggccggctccggggcggccatgctgggcccggggctcggctaggctctgggccgggcggggttgggggcgggggcggcggctaccagagccaagcggcggcgccgccggggaacatggcggaccctctttccctacagaggggctaagaccggcatgcactgcgcgtgcgggggtgggggcggggtaggctctagggacttgggcaaaattactgaagctaggagagaaacaggacgaggccaagggatcaggttaaaattctttgcatgcagaatgaagaatgaggaggtgctgcgatcgaacgactgcgaggaaacacacccgctctcatggcattcccagtaaactgagaagacgtgattaaacctcaggatctcctactaatagagaaatgtataacgatttagctaccagatctgaatactgaagggttggtaggggaccagagaatagaggaagcattgtaggttctagagtggagaagggaccatccaaaatggagtttgaaagagaattctggcctttgtgtttagagtctggaattgtcaagagtctgaaagcacagaataagactgcagctagagcaatttaggcgccatagtttgtcaaaacaggtaaggggaataaaggggatgacaccaagagatgtgcaaagaatctgaagaattcacctgaaaaggatacaacctcctcctggaaggcagaggagtaaatagggaattggaaattaattccttatttctgcacatgcacagaatctgggcccaggtgacttatggaacctttatagagaccacggtgactgacactcatgggaaagggggtagaggggcaagaactgactgttcatcaaaaattattagatgagtgtgtccacgacaccaggagatatgttgaatcatggacagggaccagcatatccactaagctctatatatcttgatggtgcaggatccaagtgggatggaacaaccaattcctgcccatcctcctgctcaataatacatgtgctcagaatctgttcataatgcatggtggtaagtaagtagtagtccgaaggtccaaggagtacctttctacctcttctttgtgtcaatttctatcctgagaccccaggaaaagaggaagggaaagacccaacaatggattttttccaaaaagggaacccacaagctattttttagagggaagagtctcgggagtgaggcacaggtgaaaatggatctttctggcatggaagggccataacaccacaggggaagggaaagggagaggcccccacggaaggagaggaaggaagggacaggaggcacgtcacaaacttataagatagagggaaggcacctggagtacattgatcaggagtgagtctgtaagaagagcttgaatccccagaaaatcttcctaaggaggggaggaaggaagtgtataatgtactgagtactgaatgctctgtcaggaaagggatgggaaacatcctagcagcaatactagaaaggaaaggcaccctattttaggacccattgattcccaccttgattgtatatccttcaactcgtctctggctcctcacttccactcagtcaaaagccacttcatatatttatccagacttccagccccaatacaaagaaagcaagagcatacaaagggaagaatgacaaggaattaaatagaactgtcttatagatttattaatgaaaaatactttacaaaaacagtatgtttggcctaaaatagttcagctgactctgagggtttacattgacgactgagcaagtggcaataatggctgtgttattgaggacagaaggctgtgttagtgtgcctgactccatctgttcaaaagggtgaatgttatgttggcagctccgcattctaggcctaaggtttggagggcacagggaatgctgacaggccataatacctgggcaggggggctgccctgatgatgtcatcagaaccatgaccacagggctacatgtccccccaaggatgggagacagggaagacaaagggtcaggtaatagggataggtggataaaacaaagagtagaagttgggagtatagtagggaacagaggatgagggctcaggtggaggtggggacataaagcatccaggaataaaatgtgaccttaaaatcctaaggaatggctagtatccagagtaataccatggattcatctttaaagtggctcagataaaacccttaaacagcagctgcttccttttgctagggggaatggaagttggaatttcaaatatcccctcccaaagaatcacatctttttagaggttcctgacacccttaggagaacccaccaattctatgttgagatgagaatagcacaaccatggcagtgatgcagggtaccaacgctgccacagtagtttattttgttgttgttttgttttgttttttgagatggagtctcactctattgccaagctggagtgcagtggtgcgatctcggctcactgcaacctctgcctcccgggttcaagcaattctcctgcctcagccttccgagtagttgggactacaggcacgcaccgtcacgcctggctaattttttgtattttggtagagacggggtttcaccatgttggccaggatggtctcaatctcctgacctcgtgatccacccgcctcagcctcccaaagtgctgggattacaggtgtgagccaccgcgcccggcccacagtacagttttacaaagaaaggtgtagctccaggaaaggaaaggaataacctttaccattgactgtgctgcaggactctagccctgatctgctctcttctgggagcatctgatagaacaaacagaaacccctctcccactgttctcctgtgtccagagtgggaggcataactgctttgcctccagtcatcatctgggggcatatctactcttcgaggaccaggggttcgggaccctggaacaggatctgaattccaagctgacctcaggggtacatgaagactgctagatggtgggtacacaggatgaacaatgggagggtgggagggtgaatggaaaagatcactccaggactgagtgtgaggaacctgaaggcccttgcttctttctggtagtgtggcagtgtaggttagttgaggattgcaccctggagtagtcaggaatctggtcccaatatgctggttggtctctgaccagggtgcccaggagttgtctgttctggagcgatgggggaggctctggtagttcaaagtccttcctgtgtacttggccccttgggaagtttcacccctgtcacacatagccagaaactgctggacactccttgaagttcctggggaaagaaaagaaacccaaagactgagcatcttcagaaaaccattctccttcccagagagccatgcctagctgtgtagcccaattccctactcctccaagagcatacatacaagggaaagaatgaatcaagctgtgcttttgattccatttcttaaaattcttaatatacatcaaaatcaaatctcatacctccaacctgggcaaatgaaacagtctcatggatgttgccatacctctacctccctccactataatctctcatccactatacacacacctacaaaagaagggctccctaatatatagcaatatatggcaaacgtatactccctttgtgatgactatactcctagagccaccataccaaaacctcacgcagcttttctttttaaaaaaaatagagacgggatctcactgtgttgcccaggctggtctcgaactgctggactcaagtcatcctcccatcttggcctcccaaagtgctggaattacaggtgtgagacgctgtgccttgctttttttttgtttctccaacttttcttaaaatgttaccttcacttcagttaagctgcctttgtttgatctctgagatctaatgtggaatgccttttcttatacatttattcaactttggcactcttggtatcttgggctgataattctttgttggggttggggagagactgccctgtgcattgtgtgatttattaatgaaaaatactttgcaaaaacagtatgtttggcctaaaatagttcagctgactctgagggtttacaacaacaactgagcaagtgacaataatggctgtgctgttgaggacatccctggcctctacccactagataccggtggtacatcccctttatccattgagaaccactgcctcaagcttgtacatccagtgcatgaggggaaaaaagagaacatctcactcggaaggtcaaagaaagccaaaatgatattgcccaccttccccacaattgtctgggtctgtacacatggtgtgggtactccatgtaaagggtctttccaattctcccactcattccttatcttcctagaccatccctcagctgagactcagaggatagaaggggagaaaactagctcagaggatagaaggagagatgaccatttctgttctggggatgtcccaaagactgggtattaactcccctttgtcagttaaaagcttattctgtcatgactgaagcaggtcattttcgtaagtagacagactctaggggtgctggtctaaacccttggtctaagaatcatggtgcccaacaaatgatttaatatttatctagataaatgcacgactttgaagcagtaattcatatcttcacaccactccaccttgggatacccccctccccataggtatactgatttgacccttggaggcccctgaaaaggtaccaaattctggcatataatattagatttgggggagttacctgggagtctattgggctcccctgccatggtgggcatcaggacatctggggacaggaactgtggttggggaaggtagagttggggaccgaggagaaacacagaagggtcatggatgacagggagggaagaggagctggaacaacggtgcccggtttccaaaggcttcctcacgtttgatgaatccttataatgagacaagacaaaaaaacatagagatgaggattaacacaaagcaggatgtagttgggtaaacacagtgaggcaagcaaagggaaatggagggaaccagagcacaaacatgcctacatgccttgttctggaacaggacccaatttactcagttgctctccctgctagccctctaagaaactgcaaacttcagatccttatcccttaaccagtcttcctcatatccctcaccttcccaaccctatcattcaggtctttagcaaactccttaatgctaacagtagaattagagagattgagatagaaatttaaaaataaaaacgaaatatgagaaattcagaaagcctgagagaatgagaaaaaaaaatccttcacttattctaagtactgggaatgaaactatatatgtttaaatgtagaatcaagaactctaccccatcttctctcctgtcactgctacacattccacagcttcctcttttgcctgtcaagtttgtatttactgatgctaatgtcctgctctactccctattagttatctacttttatgataaatacccagaaatattcccctttaacatctgaaacactaacatatccaaaattgaaccaaaatccttccaaactcctcctcctggcacctcattttcctaaatcacccatattcaaacattggcaatgaccttgatttcccacttcccatccacaattccattacttgccaaggactatcatttctacctatgggttttatatttaaattcacctggactactgcaacagccttcaatctgcttttcctatctcccatccactcctccttactgtggcctacaaggtcctgtgtgatatggccctgctgctcctcactttatttcctatcattcctggagcttttacactctaactttaatattcctcaaacacaccaagctcattgctacctcagagtctttatacttcctgtttctgttaccaagaatattcttctgatggctcatactttcatatcactgagatctctaatcaaaagttacttccttagagctgatttccctcactaccctactatcaggaatagccctcaaaaaaaccactattacctctttactctttattctcttgccttattattctttatcatacttatcattgtctggcattatgtcatttatttgtttattgtcttctcccctatttctttttacttctgtatccgcagcaccttgaacagtgcctagaacaatgtgggcacttagtaataatacattaaataaaataatctatatgccagtatgtctaatttcctttacgagactgcaagctactcaagggcagaatttgtgttgtttcatcagtgtatgctcacagcacctactacaaaatggcacaaagtaagcatttatcatactgcctaaggaccaggtgccagtcctctcagcatgtgacacagctaattattcctttcttctttttttttttgagacggagtctcgctctgtcacccaggctggagtgcagtggcgcaatctcggctcactcactgcaagctctgcctcctgggttcacaccattctcctgcctcagcttcccaagtagctgggactacaggcacccgccaccgcgcccagctaatttttttgtatttttagtagagacggcatttcactgtgttagccaggatggtctcaatctcctgaccttatgatctgcccgcctcagcctcccaaagtgctgggattacaggcgtgagccaccgcgcccggctattcctttcttcttgaaacactctccccttggtgactatggtaccacacatccttggtttcccttcagtctctctaatctttttttctcagtctccttttagggttcttcagaagaaccaccttaaatctgatgctctttagggatatgtcctggctcctcttctctttctgcaagtcttttcctctttttcaatggctatgattcccagatttcaatttgcagcttatatatctcattccaaaagcctgccagatacctccactcaagcttaatatatgtaaaactgaatgcatatcttccctcaaatatatcattatctacccataaaacttgagtatcatcctttatccccactcccaacatccaggcaggcaccaactcccactgatgtttacttcctaactgggtctcaaatacatcgacttatctctatccttccaaactacttactgtgacatacagggctgtctgtggtccataatattctttgtatcctctcttgtcaacactctccatcatctccccttgccagactttctaatcctgccatactaaataagcttcttttaattcagttaatatttgctcaggtcccttttacttgctatattctttttgcttcctccaggaagccttccatgatacctcaagcctgatttaaatatcccttctattatgttcccataggatcaaatccttaacacattataactgtttgtttatttatccgtccctcactgtagactgtaagctccataaaagcagggactatatctaactcaccattgtagctccagcacctagcacaatacctagaacacactcaataagcacttatttatttgtttatttttgtgctaggaatcttgtacagaatcaataagcatttatttaaaagaatgaatcaatgaatgatacagaagtcagaagaaaggaagccaactctcctaggaaaagaacaatttgccattaaatgaattgaaagtacatgagaacaaatgctaggcaggagagtccaccttttccaaaaaagaatggcagcctgatcagaattgcttaggaatttatgaacgataaattgaatgaaacttactataaattcggctgggtttttttgtttgttttgttttgtttttgagacagagtcttgctctgttacccaggctggagtgcagtggctcaatctcagctcactgcaacctctgccacccggattcaagcgattctcctgcctcagcctcccgagtagctaggactacaagcaccccccaccatgcctggctaatttttatatttttgccatgttggccaggctggtctcgaactcctgacctcaggtgatccaccatccttggcctcccaaagtgctgggattacaggcatgagccaccacgcctggcctcggctgatttttaaaaattggaaaaatgagtacctcttaggagggaaactgaatctgaagggctggtagaagacagacttggttttcaccatatatgcttttatacctttttatttttgtaccatgtatttaaaatctgtttttacatttttcctgaactgacctagtggacaaccttcaatgcactggtactttgtaccctgacctctactgtgatgaacactcaacttgggcaaggaagtgaaattctccaaaggtatgattacctacaaacctagccactgatattatttaagtttgttgatctctaatggcttgggctttcctgcctcttctacttacacattactgcactagtaccatatgaaaattctcaagaaggcttttttcctcttcttgctgatacacatgcatcactttagattgaaaacacactgaattctattcaatcacatactgggggtgagaggaaaaagcaaaccaatactccatcccatttctttccttctttctttgattagtgcagtgggttctgacccaatcagcagcctttgcttctcagattcctctcaaggctttatgactcttctcaccccaggaaaccctacaacacgcacggcctttcagaactgctacatggaatggacattcctctgggctccagctgaatgtttgtaaataaaataatgactgcgtgtccttatttttgctgagtacacagggcctttcctcacattacaaccttcactttctccctgcttcttcacctgcactgtatttttgcttagcaaggaggagggtgctctgaatagatggaccctgattctacttacaaaactgtgggaagaaaccggagcttcctccctctctgagacaacggtgccactgagactgcgtgagatgcgacgtaaattctctgcactgtactgctcatcctccccacactccctgctgaggcctcggcaaggtgtagccttcaaacacacagacacatacaggcagacacataataccagacttatggttttcccacagacagtatcctcagggtatgggaaagagtaggggaagactcagtagtaatagacacctgaattagatgtattggtaagatagtggccatgtaacaatctcctctaattcaaaagaagcccaatcatagaccttattttcttctgatagccccatatcaccatgcctctgccttatcatcatccctgtcacatctctccataattccttccccaacacaccaccccaggcccagcaccttagcacctgaggctgctacctgagaagtacgcactgttctggcttcatggagaccatgctccatttctgctgttgaagtctttgagagaccaggatcatgggctgagtgcaacctcctccccatgccatctgcagagcctgaagaggaaaacacaaatacaagttgaggccatctcttcccctagggcctaacctctaagcctagcagcacaaactcaggagctgttgtttcatttaataataaatatgcatccttgaattcaacggaggaacatgctcctggaatttagaagcaagaggggctgggcgcggtggctcacacctgtaatcccagcactttgggaggccaacacgggcagatcacgaggtcaggagatcgagaccaccctggctaacatggtaaaaccctgtctctactaaaaatacaaaaaattagccgggcgtggtggcaggcacctgtaatcccagctactcgggaggctgaggcaggagaatggcgtgaacccgggaggcgtagcttgcagtgagcggagatcacgccactgcactccagcccgggtgacagagcgagactccgtctcaaaaaaaaaaagaaacaagaattttagaatatagatagtttactgagtgtccccatcttgcttcatttcatttttgtaaacataatcagcttctgtcagacttaggctcaagacttatagacagaggaaagtatctaacacagtgagttttgttttctaacacagtgattttctaaagtatctgtggtgacaaaggaaattatctccagtctagttcagaatagaaatgatcataataatcatctatcaaacctcctcattttatataacaggaaaatgagttccagggtctgagagtttagtagtttaaccaggattaaaattaaatcctcttgattttcagtacagtactcttaccatctcacctggtgacctcttttactctgagagcaggagctcctcaggaatgttttacatatgtaatgctcttttccccttagcttctctcaaatcatttaaatttctaaacaaccactaaatgcttacctcttttcaaaatctttctagattgttcagttgctctaaactggattggtgactcccaaggggctatccccaatccaactaattaagttttccattccaaaactgtatatgcccctgacctacatttgatacatatgtccatggccaattcatgtcttgatttgatgatttgattctaatatatatatatatatctggctgaagctgatattattcatgtaagtattgtaagaccagttattttcagtattcctgggtacttaaatgcagtgctttcaataccacctcagattcatctgggaacttttaaaaatatagcttcctggatgttaccacagagctgaatcagaaggtttgtggttggtgcctgggaattttcatttttgaaaggttcccaaaaagtctaagaaaatatccttgaacattattgggggaaatgggaaatgttacagtcttcctaaaaaacaacctggtaatctccaataaaataaaaaatatatttatcctgttgcccaacgattctaatcctgagaagaagaagaaaaaaataccagttcataacaacatatatatgagaatattttctactgacataatttatagtagccaagaactagaaataaagtaatgcccacctatagaagaataaatacattatggtttaataccagatattgtccagccacttaaaaagattgaactgagttaaactagatgatttgaagaaattttaatgaaacattgttgcattaaaaggaaaaaaatctgtaaaatgatagacaagcatttgtttatgtatatgtaggtctacataggattgtataaacagaaaatacagtgtatgcacactagataattacctggggaagtagggactggctgtgagagaagagacaggaaaattgtctataataaaaacagcatgtgtgttatgttcttatttctataaaattatttctgtatttatgtgttttttggggttttctgagccactcctcagatgactataggtagccaggtttaaggattacagctaaggctgggtgcggtggcttacgcctgtagtcccagcactttgggaggccaaggccggtggatcacgaggtcaggagttcgagaccagcctgtccaacatggtgaaaaccccatctctactaaaaatacaaaaattagccaggcgtggtggcggccgcctgtaatcccagctactcaggaggctgaggcaggagaatcgcttgaacccgggaggcagaggctgcagtgagtcaacatcacgccactgaactccaacctgggcaacagagactccgtcgcaaaaaaaaaaaaaaaaaaaaaaaaaattacagctatggctggccgtggtagctcatgcctgtaatcctagcactttgggagactgaggcagtaggatcacttgagcctaggaattcaagaccagcctaggcaacatagtgagaccccatctctaaaaaaagagaaaaaaagcattaaaaaaattagccaggtatggtggtgcacacctgcactcggaaggctgaggcaggagggtcacgtgaacctggaaggtggaagctgcagtgagccgtgattgtgccaccgtactccagcctgggtgacagagtaagactttgtctcaaaaaaaagaaaaaagatttacagagtaatgtttagaattgggtgttcctctaatcaagccaaatgtgactcctggacaagaaggtagccactggaacctcctgaagggagtagaatctgattcctttaaaagaaggcagggtgcgatggctcatgcctgtaatcccaacactttgggaggcgaggcgggtggataacctgaggtcaggagttcaagaccaccctggccaacatggcgaaaccctgtctctattaaaaatacagaaatcagctgggtgcggtggtgtgcgcctgtagtcccagctactcgggaggctgaggcaggagaatcacttaaacatgggaggcagaggttgcaatgagctgatattgtaccactgcactccagactgggcgatagagtgagaatccagaaaaaaaaaaaaaaaaagaatttaagcagaggtagaggtggccatttgtaagggaatttctagattcaatagaagaaagggttaagatgatgtctaccctctcatcaatagaaagactaccagacattatgtattcgctgatatgatgtaagaaatacaaagaacttcctattaaatattcctatttttaaaatttgtatctgattttaattgagcctctagctctaagtactaagttacaggaaaaatgtgggctagaagaacatgtttttttttttttttgagacagagtctccctctgttgcccaggctggagtgtagtggtgtgatctcagctcaccacaacctccacctcccaggttcaagggattctcctgcctcagcctcccgagtagctgggactacaggtgcatgccaccatgcccgactaatttttatatttttagtggagacggggtttcaccatgttggccaggctggtcttgaattcctgacctcgtgatctgcccaccttggcctcccaaagtgtgggattacaggtgtgagccagtgcacccggccagaacatgttttttttttttttttcttaaggacttagactataatcagcaaaatctacaatgtgtgaaatgttaaaagacaatgaccaaatttcctcaacaaataaatggagggggaaaaaacatagggtatcatactggcaaaaaaaaaaaaaaaaaaaaagacttaagagccttatcatcaaaatgcaatatgtgtgtcttgtttgaatcctgacttgaaataaaacaactgtataaagacatttatgggaccactgagaaaactggaatattggctaggtattatattaagagattattgttaattttttaggtataataatattattggtttgtcttttaaaaaagaatctggccaggtgcagtggctcatgcctgtaatcccagcactttgggaggccaaggcaggtggatcacctgaggtcaggagttcaagaccagcctggccaacatagtgaaaccctgtctctaccaaaaaaaaaaaaaaaaacaacaaaaattagccaggcgtggtggcgcgtgcctgtaatcccagctactcaggaggctgaggcaggagaatcgcattaacctgggaggcagaggctgcagtgagttgagatcacgccattgtattccagcctgggtgacagagcgagactccgtctcattaaaaaaaaaaaaaaatctttatttctgagagatacatgccaaattatttatgaatgaaataatataatatcagagattcagagatttgttttaaaataatctagaggaggctgggcatcgtagctcatgcctgtaatcctagcactttgggtggttgaggcgggtaaactacttgagctcaggaggtagagaccaacctgggcaacatggcaaaaccctgtcgctccaaaccacacacaaaaattggtcggatgtggtggtgtgtgcctgtggtcccagctactcaggaagctgcagtgggaggacctcagcagtggccctgatgacaccactgcattccagtctgggcaacaaagcaagaccttgtctcaaaaaataaaataaaataatgtagaggggaaaggaaagtgggggaggtatagctaaatcaaaactggccatatgtgtggtggctcacgcctgtaatcccagcactttgggaggccaaggcgggcggatcacgtggtcaggagatggagaccatcctggataatatggtgaaaccccgtctctactaaaaatacaaaaattagcctggcatggtggcacgtgcctgtagtcccagctacttgggaggctgaggcaggagaatcacttgaacccgggaggcggaggttgcagtgagccgagactgcaccactgcactccagcctgggagatagaacgagacctcgtctaaaaaataaataaataaaataaaataaaacaaaaactggccatatgttgataactgtgcaagataatcactatggaagctggttataagtacctggagggttattataacatttattcttttttttttttttttgagatggcagttttgctcttgttgcccaggctgtagtgcaatgggcagctcactgcaacctccatctcctgggttcaggtgattctcctgcctcagcctcctgagtagctaggtttacaggcatccaccaccaccatgcccagctaattttttgtattttcggtagagactgggtttcaccatgttggccaggctggtctcaaactcctgacctcaagtgatccatccactttggcctcccaaagtgctgggattacaggtgtgagtcactgtgcccggcctactcttattctttacttttgaatatatttgaaatttcccataacaaaagttaattttttattttttagatatctataagatgatgtctgcccaagttcaaagtacaatgaaattcagaatataggtcaagagcagtgtttatataacactttaggaactacgattatgtcaaaattaatctggttacaaaagaccacatactgcatgattccatttatatgaaatgtccagaacaggcaaatctctagagaaagaaaatagattagtggttgcctggggttgggggaagaaaaggaggagataaagagtgatttgccaacgggtacaaagtttctgatgaaaacaccttttttttttttttttttttgagacagggtctccctctgttgcccaggctgaagtgcagcggcacaatctcagctcactgcaacctctgcctcctgggttcaaacgattctcccacctcaaatgaaaacactttaaaactgattgtggtgatggatggagaactctgatataataaaacccattgtattgtacactttaaataggtgaaatgtatggcatgtaaattacatatcaataaagcatttttttttttttagcattttttgaaaaactaatttggtggccgggcgtggtggctcacacctgtaatcccagcactttgggaagctgaggcaggtggattgcttgagctcagagtttgagaccagcctgggcaacatggtgaaaccccgtctctacaaaatatacaaaaattagtcaggtgtggtggcacatgcctgtaatcccagctacttgggaggctgaagcacgagaatcgcttgaacctgggagacggaggttgcagtgagctgaggttgtgccactgcactccagcctgggcaacagagcgagactctgtctcaaaaaataaataaattttaaaaagtaatgtaatttggtgcttaataaatgttttacaataagataaagaactctcaaattatattttttcttttttttttttgagacagtttcactcttgtcacccaggctggagtgcagtggcgtgatctcggctcactgcaacctccatctcctgggttcaagcaattctcctgcctcagcctcccgagtagctgggattacaggcacgtgccacaatacccggctaattttttttgtatttttagtagagatggggtttcaccacgttggtcaggctggtctcgaactcctgacctcaggtgatccacccgactcagcctcccaaagtgctgggattacaggcgtgagccaccgcacctggccaaattatattttttcatatgtgaatcctaattggcattttccttcatctacttcccaattaattctatctgatcacttctttattctatgtcatatcactcctcttttttttgagacagggtcttgttctgttgctcaggctggagcgcagtagcatgaccacagctcgccgcagcctcaacctcccagtctcagttgatcctcctgcttcagcctcccaagtagctggactactgacccgcaccaccacacccagctaattttctcagtctttgtagagatggggatcttactgtgttgcccagctggtcttgaactcctgggctcaagtgatcctcacaccttggcttctcaaagtgctggtattacaggtgtgagccactgcacccagcctgtcatgtcacttcttaaggactcagtttttaaaccaaggactctaacaaaaataaagactagtttgattttactttttttttttaagagatagggtctcactgtgttgcccaggctggaggagagtggctgttcacaggcatgtgctcatagcacactacagcctgaagctcctggcctcaagtgattttcctgcctcagtctcccaagtagctggggttacaggcatgagtcatcatgctccgcttgatttgataaatatattgagaatagattgactactagatagatttttaaaaatttgtttctttacactactagacaaaaaaattaatggtcagtaagtactctttcatactgttttcagaagtatagtcttcttcaaagctaactggccagtatgtatcaatattttttttaagtttataacattcaaattagtcaggtatggtagtgcatgcctgtagtcccaactactcaaggggctgaggtgggaggatctcttgagccaagaaggtcaaggctacagtgagctgtgatcatgtcactgcactccagccaagacaacaacatgagaccctgtctcaaaaatgaaaaaaaaaaagtttataacattcaactagttattagtcttctaaaaggttattctaaggagctcatgagaaacgtgaccacttaagtgcaaagatattcaacacagtactatgttattaaaaattacaagtaagccaggagcggtggctcaccttatagtcacttctcactttatagtcccagcactttgggaggctgacgcaggcggattacttgaggccaggagttcgagaccagcctggccaacatggtgaaaccccttctctactaaaaatacaaaaaattagccaggcttggtggcacacgcctatggttccagctactcgggaggctgaggcagaagaattgcttgaacccgggaggcggaggttgcagtgagccaaggttgtgcaactgtactccagcctggatgacagagcgagactgcctcaaaaaaaaaaaaaaaattgtaagtaacctaaatattcaacaatagtaggatggttgaagaaataaattacagtacattcatatgaaacactttataaccattaaaggtagtttttacagcaaatgctcacagatataacatgagaaagtcatgatactaaactgtatacatatagtgtaaaggatactgctttttgcaaaaacaaaactatatagtacatgtgtataaaaatgaaaaccaaaggtaagcttatgaaaacattaagagtgagattatcagtgatttttgatactttatgtattttcaaactacctgcaatgaaaaatgttgctattttgggtaatacaaatttttttttgtttttggttttgagatagagtcttggtctgtcgcccaggttagaatgcagtggcacaatctcagttcactgcaacctccacctcctgggttcaagcaattctcctgccatcagccccccaaatagctgggattacaggtgcccgccaccatgcccagctaattttttgtatttataatagagacagggtctcaccatgttggccaggctggtcttgaactcctgaccttgggtgatccacctgcctcggcctcccaaaatgctgggatcacaggtgtgggccaccgtgcccagctaatttttttgtgtgtatttttagtagagacggggtttcatcatgttagccaggatggtctcaatctcctgacctcatgatccgcccacctccgcctcccaagtgctgggattacaggcatgagccaccatgcctggccttattattcttaaaataattacttgtggcctggcacggtggctcacgtgtataatccctgcactttgggaggccaaggcgagtggatcacttgaggttagggcttcgagatgagcctggccaacatggtgaaccccatctctactaaaaatataaaaattagctgggcgtggtggcacacacctgtaatcccagctactcgggaggctgaggcaggagaagtggcctgaacccaggaggcagaggttgcagtgagctgagatcacgtcactgcactccagcctgggcaacagagcgagactctgtctcaaaaaaaaaaaaaaattatttgtgtattcttgcttccttagatagaaagctcactgaggcagactccagctttcccttattctttagattcttcccatatcaaccagtcctatcaaagaccaccttagtaaatgttattgtaaaatctacattaggatacggatcctcagaaatgtatcttaatatcaagtcttaggacaggcacggtggctcacacctttaatcccagcactttgggaggctgaggcggggggatcacctgaggtcaggagttcaagaccagcctggccaacgtggtgaaaccctgtctctactaaaaatacaagagttagccaggtgtggtggtggacgcctgtaatctcagctacttgggaggctgaggcaggagaatcacttgaacccgggaggcggaggttgcagtgagctgagatcacgccattgcactccagcctgggcaacaggagtgcaactcttctcagaaaaaaaaaaaaatgaataaaaaatcaaatcttatatttatgtggtattcccctcaaaggctctggagaacacagtaagtactcaataaacacttactcaactgtaattatatgttggttgtcagcatgcaaggaacctgcaccattacagaaactgtcacagccaagctaaggaaaagttctccaagttcaatttcacagaatcatacatgccattttagagttagaacatatctttttttaaaaaaaaagccagttctctcattttacaggtaaaaccttggccctgggatattaagtgacttgtccaaatttatactgagagttaatgttggaatcaggaaaatagttcaggctttggagttaagtgcatcaatgtaagttacaaacattcttcatgtcttcaatttccagaactgactatgatgtgcacttcaggtgcaggctctactcttcactctgtattatctcagtcagtggctaccctgtaggcatatagtacattaaaaattccttgaacaccaaacttgacttttcctaaagggatcaggaaggtcttgatattgctggttcagtatgatctggaaatgtccacactgagcatatggacatcctactgcaaagcagacctggaggctgaatcttgggattctaagccatagaagaatatattttcctctcagcctccctccatttcatgctgtcatgctgaatcactctcaaacacctatgaaccattctttttttttttttttttttgaaacggagtctcattctgttacccaggttggagtgcagtggtgcgatctcagctcactgtaacctctgcctcccgaattcaagtgatttccctgcctcagcctcccgagtagctgggactacaggcaagtaccaccacgcccggctaattttctgtatttttagtagagaaggggtttcactatgttggccaggatggtctcgatctcctgaccttgtgatctgcccgcctcgacctcccaaagtgctgggattacaggagtgagccaccgtgcccggccctgaaccattctttagcacagcatactggagaagccatgggcaaatacttagtaatctcttactttagaaggagggaagttgcctatgagtggtaattctgccccttcctccactctagccagaaaaatgtctaggtcttgtcctgaaggctttctgagtaaagtcaaaagttctattacctcctactaagctggggatagtatctgtatagaacactcccttctgatctttccctgctttcagcttttatatgatcctcccccctccccccaacccctggttgcattcttacctgtttggctaagtgggtgccaggcggtatcctgctgcccccatccagaacagccagcttgagaagcctgaagactggcctgatacagagactccaattctgaggtctcctgctctgtgtcttggttccaatgtggatgcaaaaggatgtgatttctctctggataggttacacacgtatgggaatcatgaggggaggacttcattcctggcctaggtgccccatgcttaagctgagaatcacagaaccttgtgatattcacccaggaatccaaaggcaaggaagtccccaagtcagtactgctgcccagatccttagacctaacatctctcacttgggacagcttctcttggtatatgtctggctctgccaacctgggctgtcctccgctagaagtttcaccattaggcagcccagagtttaaggcaagagaagaatgttcagtggactcttcccaggaaagtggtctatccccaccctccagagaggattgttgctttgcccatggccagtggcctttctcttgaccctgtgagaaaggaggcttagaatcagaaggggaagagttcttccttagactacctgacaaacttctatccttgaaacctgtactatccctcatggagacaccctgcatcctctggaactgctcagccagagaacggacaagcccctttgtgctgggaaactctggcctataggtctcctcactgcctctgtccacttttaaagtcaatgaagttttgaggctttggccttggaggcattggttagttttctgcacaggatcaggacagtgaagcacaaatgaagaagcaacaggcattatggggtggcaggttctatacaggggaaggctgggctgagctgatgaatttgaaggactacagcctaggctgtgttcatcacccctctcagaggtggctattccaggcatcaccggggaggggttagcaggatccttcttttcttggaacagctgttcttgagcaatgcctcttccttcttgtggagggagcttgctgcaactgctgttgtcacacctagagccttgcagcttaccctctggggcatccaatggctcccaactatgatgagaattcttctcagtccaccctggtgctttaggtaaaccttgcctgtggaatgcagagggttcaatgttgtctacttcaaccgaagtcagaagcttcaaggcagatctactgggggagctgtgctgtggggcagatgactctggagatagtgatgagtgtgactcatggcaggaagcaggtgaatggaagaaagaactggccccaaactctgtatccatgccggattccagttgggcctcttggcttaacaatacttggagcgggataggctgttcactgaaacaaatggagagagctagtcataagctgccttgactgacaggaacacttacagaaagaactcaacattccattcccatttctagctattcacacagggaatggtaaaaataaacagaaagacaagcacaagtagagtcagtagttcagaggatcacaaaagaaaaggcacatggtcagctcacactcaggtaaataggtaacgttaatcctctttattaaacaccctcaccaaagttgcacagtaacattaagtggagcccttgccaatattcttcactacctgtgaagtcgcattccaatcacattctacttgcaaattaggaaacaaaatcagctagtctcacatgcagatgacatggaaggtaagcaaagcctgaaaatcactcataccaaacagcaaaaatccaggatgctatacagggaggcaagtcctacctggggtcctgagaggcagcccggccaaaggaactatgaggccacatttacaaaatacagggtgatttgggctcatgggaatacacagaaattaaccatttcaaatatgtttttataatctggattttgttctattagtcactgagatgtttccccaaagcaatatgactctcttgagatttaggagtaggagtagggattaactgtatttagttggtttctcactaattgttttgtatttctgactttaaaaacttaatgttacaaggacttaaataaagcctcgatcactcacatacatcaggatgtatacgttttctggaaacggtttacctatctaaattgcttatattcaaaacaagcccctaaatttgaatgaaaatatactatcaacttttgaggatatagtcacccagtcacccttataacattatggagaatatgatttactaatatgggaagcccaatcatacaaggcaatattacataatggttaaggacatgtgctttagcatcaaatagacctgcaattttttttttttttttttttttgagacaaggtcttgctctgtcacccaggctggagtgtggcagtgccatcacggctcactgcagccttgacctgccgggctaaccgattcttccacccaagcctcctaagtagctgggaccacaggtatgcaccaccatgcccagctaaattttttgtgttttttgtagagacagggttttaccgtgttgcccaggctggtctcaaactccttgactcaaataatctgccctcctcggcctcccaaaattctgggattacaggcgtgagctaccatgcctagcagttaactatttttgaacatttgccttttgaacattgaacccaggaggttgaggctgcagtaagctgtgatcgtgccactgcactccagcctgggtgaaaaagcaagatcctgtctccaaaaaaaaaaaaaaaaaaaaaatgttaactgcttttactaatttatattttgaaaactactcagaattattaacggtccaaattaatgtttatttaaattcatctattctaagtaaaagccaaattccagggctaagatgtgagaactacaacaatgactactggaacttctttcctagtcctgaccataaagaagcaaagcaaagggaatctttgtgtctcttctctatggtgcaatcagagcaagaaagactgctttctctgcttccataaggataggaagcactgaaatcccaaaataaatcacatggtagctactacaacatgaaatgtagcctggattgccatgtctaagaacataatatatacaaatataataatcgcgttattacacaagtccagggctaaagttacccatgggaaatgtggacaaatggtcttattatgctgtactttttgcatcctaggaattattaagataaggaccagcagtacaatgagcttttcactgtatgtctgacctgaaagaagaaaatcttttcagaggactcctctctccccttcagtcgccaagacaatgagagctcttgctacagaatactcatggtcatttcttcccctggcattcataaactaacatggttcccaagcactaccttgttggctgagagagagtccccgcctgtgttgggaggcaggctgagggctgcgacggctgctgtggtgattgctgctgctgcatgcgatcctgcaggctccgtgcttttcgaatactgatttgcaacttcttatcgactagggctctgctgtgcgtgctacagctggcaccatgcagggcaagtcttagtttagctaaaatgcaaaagaaaatatagcagaaacagaacacaaaacacaaataaaaataaaaagaataaaattgaaaaaaaatgagcaaagatatgcagtaaaactcaaaatatgtagcaggaacgcaaggcatggaccatgcatatgctgtccagggcacacagctgcctctggctataaggaacattgatggaagccatggaggccaaacaggttaatccaaattaaaaaaacaaaactaaaataaatcaagaagataaaccagtgcctccatcttagagattgccactcttgtcctttgcatctgacctgtctgactctggtctccacactctactctcacccctctcttcccaatggccaacagcagaaataagatccaaacctgcatctgtctttatagaccacagcttcttgtgggtcacatacaagaagctgataccaattctaagccttagtctcttgctgtaagtttatggtgctgcatactatgaaggtaggggagaatcagaaagaatcaaatactgaattaaaaagtcacaggcctgggaagtcatagccaatttattcagttttccttctataagctccaacccactagccagtgactagcaaaagagcagactaatttcacatctgaggtctaactttatcctgaaataagaaggtaggcatgactggagaaatcatctatggattccttgctgaggttattctggtaaatatccataggccacagtgccagtgccaggtacacttagaaatcaaagggcaaaaacagctaacgcgactcagtttgggagagcaagagtgaggagacacaaaaactgtttttatcctgtctgagtgacaacactaataatacctattgtgaagttagtcaaaagtgccacagccatagcagttagagttacttacagatagcttcattacagagagccaaagctgcagcacagtctcctttctgttccagatgtagtgactcttcaaacactgactctgcctcttgcagggacctctcaaagccgtcactcctccctgaaagggccagcacttttcattttcattacaattcattccaaattttcctgtgtactgttgtttcccttcagtacacagagatccttgctgctgagccactggtctacccttattccaactgtctattcctattaagaattatctgaaaacaagcaggacatccattttgccttaaccaagatgttaccaaggccatgaaagagaggcatgccattaatggccacatattctaacaccaagacccttaggaagtccctcaaggaaggagctccagtggtgcaatcggttagcgcgcggtacttatatgacagtgcgagcggaggaagtccctcaaggaaagaacaaagtaatagcagaaggttaggttcttatgcccggaattgaactgctctttcccagtgcaattcttgccaactagtgtcagaacaccctagatgtcaactaagacgttcactgctatgttatggcaaaggtagcttcattattctgtggacagccattcataccacttatttacttcaccaattcacagtcctctatgcaccaccctaaactggaaaatcagtgcacttcttggtcacagatggtctacacttcctaatccaatgtatctgccagggcagttgaactgccttcattcctggtttgcatatacatacttgtcataagcgttgctaagtatttactttcatcatgctattcctcaccaaaactacccccaaagaagtcaccttcccatacagcaagcagggaatattccatcctcctctcaaagtgaatgtgtgccaaagcaggtgcagaagagtctaaaaacaataccggatgaaaaggctaggaagtacaggcagaaaaatttttgtaaaagaactctcatgtttatgtatcccttgccctctacttactcataatcatacattggcagcaagctgtaatgtaatttcacctacaaatgggattgccagtgagccttcacaaggttgcagggaaaaaaaaatgtctgagtcacttctcccataatgtccctcatcctccacttacctccagcaggacatggtaagaaaggctcttccacatccctaacattcacttcctaattcatcatgactttttgagagcaatgggaagacaatggaaacagcaggttggttctgaagaacttggcactcaggatccactctatctctagaggtgtggtttcccttactccccagacctgaagttctctcataatatttgtaatcaactaaatgtatacaacctttataatcagaggtagggcgtagagccattttttttaagttctctactctatggagatctagacaagctatagttgatcaatcactgtactaaattttaattcttatccttcagaatcttagcattccattccttgctcatgcaggaaatgctgaaccacagtgtatagagaactgacaatgaaatattgccagtgggatctcctcctaactttaatctattgcccaactggcagagagagaaaaaaaggagagaaatgacaagaccccttttttcagaagcaaaataaacctgggacaccaatgtgatacagcttgaggtcaaaaagggaaaaaagactatccaaatatagagacagctaagtattaggaatttaaaactaatttggaaactaatacaatgtcttgggaaatataaggcaacaattaccttgaatcaaaagagagtagtattaaaggaaaaaagctgcccccaaacaggattacttggcccaagaagattctctaagtgtatataaaaagagaaaagtggtcaacagaaaacagccagcaaagttaaaagcttgcacttacaaactgggaccttcatactgctttagcacaatttgttgtaagtggggtttccgaattataaaaacaataaagtcattttataggaaaaaaactaagatatatggcctatttaaggtagatacttcagcttggctgaactattttgaaggctagtctcttttggtacaaagtgacatcctaaaaaaattctaggaagaaaaaaagtctaacatggggcagttgtggaagtaaagtccatgcaaattgtttgaggttacagaatcaattgtcatggtatcaaaagtaaactggctttgttcttgctcctgtttggcagatccacttccctgatgctccaggtggaatatttcatgggtatgtttcttcccagcaagtagaattcccctcactgtcagtgtggctcactgccattttcagctatttctgactcaaggctagttttatttacaccttcaacagatgttcatgggaaacattattcatgaacgatatactatctctaatctataggcttttaatagatgtgccccaaatcagtgcctatctccagtcaatagtcttgtcacatcctactctaacttgttctcactggaatgggtgaattaagacttaaaaaattattttgctaaagagaagacagggaacttacaagcttagatgtttttttctaccctttctgtctgtccccatcacccacaacctaatgctcacaacaattaccctgattctgcagttcatccaagtccatgaagcggctaggatgagggttaaaccctttcgctgcctctaactccttctcccgttttcttcgaagttcctgttcctgcgccctcctggccacctcttcctgcaattcatccagttcacttttagaagatatctcctcacctgtaatataagcaagggagaagtcaccacatttccattaccaagactaagtacttgatgaatttatgaccactgcaatactttccttttggaattcttgctttcaatttggagtttatttatttattatttattattattattattattattattattattattattattattttgagacggagtctcactgtgttcccaggctggagtgcaatggcgcaatcttggctcactgcaacctccgcctcccgggttcaagcgattcttctgcctcagcttcctgagtagctgggactacaggcacatgccaccaagcccagctaatttttgtgtttttagtagagacggggtttcaccatgttggtcaggctggtctcgaactcctgacctcgtgatccacccaccttggcctcccaaagtgctgggattacatacaggtgtgagccactgcgcctggcccaatttggagcttatattttggataatgctttccataattagattccggatggcacttgggccaggaataataataataataacaacaggccgggcatggtgactcacgcctgtaatcccagcactctgggaggccaaggcgggaggatcacctgaggtcaggagtttgagaccagcctggccaacatggtgaaaccccgtctctactaaaaatacaaaaattagccaggtttggtggcaggcgcctgttatcccagctactcgggaggctgaggcaggagaatcactttaacccgggaggtggaggttgcagtgagccaagatcgcgccattgcactccagcctgggagacaagagcaagacttcgtctcaaaataataataataataacaacaacaacaacaacatttatggagtgcttcacaacaatagtattacgctgaacatttgttcagcacttactatgtgccagaaacagttttaagcatgtttacatgtattatttcatttaatcataacaacaacttatgaggtagatactattacccccattttaggaatgaggaaactgagtcacaggaggataaataatttgcccaaggtaaaccaaatgggaaataatggagctaaattaaagtcaagtaggttaaattcataatcatgctctaatcattagagaacactttctaccaggtgctgtcactgactgactggggagcttcaagaatgtcattttctcacccttaatttccaccacctctttgaatttgtaaaatgtccacagcagtataagtccaattttataaacctttctagatggatctaaatagatccagaaggatgtccataataaattaagtgaaaaattgagagaataacatgcatagtatgacttcatctttttaaaaatggtgcttacctatatatatatgtacataaacttatctatgtacttgtgtaagcatagaaaaagacagaaagatatataccgcaatggtaacactggctccttcaatttcaggaggcaaagggcagattattgaattactggacttgatttacccctgtagttttttaaaggagtatgcaaagttaccatataagaatgtttgttctgtgtcttaataaaatggttagatcaaattgtggcgcataaatagggcttattatacaaacaggatggtggggtgatatggtgtgtgaagaatcttgtcataactccttgctaattatcttttaccagttgaagaacgctgttggtgaattctatccaactggtccagaattgaggactattcaggagatcatgagactcagtcattagtgtaattaaaaaaatgctggctatctgaagagaagggagaatagtctcatgcacgattcacaagtttcttgaaacaatgttattcaacatgaaataaattaaaatgtggggaataaatcaaatgtataattacaatgggaagcccaaatgtcttccacgtgtctctaactataacttactagagcccaggattccagagatatctgcctctataggcattgttctgctctgccagatgtccacaacctttagtatacatacctaaaagggttcatgcctttttactactgctgctgcaggcctttcttcctgctacctctaagaattgtcagtaactatcaagagaattggtagtaagactaagatatttagccaggggtaaggataaatttgaattgcttatttccaagttttgcaaatagccacatgtacccctttggtatgtcaattcataatactaaacaataagaaatccatttcccaagaggctgtccctaatccaaggaaagccctaggatttattcttctgaagaatggggatgttagtaacactgttcaccatatttctgtcccttcttgctcccacaagggctccctccaggtagaaagaaatattcatgcaggctgtgatggagaacaaaaaatagataaatccaaagatggagcaactgaaatgactctacatttacattctgatggaatactcaaactgtaactgtcctctttttttttgaaatggagtctcactctgtcgcccaggctggagtgcagtggcacgatcttggctcactgcaacctccgcctcccaggttcaagcaattctcctgcctcagcctcccgagcagctgggactacaggtgcacgccgctacgctggttaattttttgtattttagtagagacggggtttcaccatgttgcccaggctggtcacgaactcctgagctcaggcaatctgcctgcctcggcctcccaaagtgctgggattacaggtgtgagccaccgcgcccggcctgtaactgtcctctaatttcaaatgtgctcaggtaagtctggtccccagacaaaactgccggtcaaatccagtcctcaaattcagtgtcattctgcttaccagagaaaggctgactctttgtccagccacccatggatgctgtggagtctacctccaggatgctactgctgtgcgactttgggatatgacgccaggaaggaaccaacccagctgatctcttagcacttggatcccttcaaaagagaactcagagtctagtgaaagcatgaaagcaggttatagcaacattcctaggactaaatctctctctcaaaaaaaaaaaatcaaactacacaattagagcttctgctaaactacttctgaagaattgaaatatccactcattctcctatctaacctcatctcacctcattcacaacttgtgcatctagcacagtatctggtacataatacatattcaaaatctgttgaatgtactaatgaacatattggtttcatatttatttccttctttcttactaaacctttgtagcatcttctcataagtaaaactcaacaggatcctgtggacagggaagaacattgacagagtatgaacatgtggttatcacctttgtagaagatataatcatgcttttcaaagcagctctactattagaaaaattgccttggccaggtacagtggctcatgcctgtaatcccagcactttgggaggctgaggcaggcggatcatgagatcaagagatcaagaccatcctggccaacatggtgaaaccccatctctactaaaattacaaaaattagctgggtgtggtggtgggcgcctgtagtgccagctactagggaggctgaggcaggagaatcgcttgaacccaggaggcagaggttgcagtgagccgagatcgtgccattgcactccagcctggtgacagagcgagacactccatctcaaaaaaaaaaaaaaaaaaaagaaaacagaaaaattgcctctgtggcaactcagtaaaaataatgtatggagatttgaaagttataaagcaaactgagccctatgggcagggtacaatgagtgctaataaactgtcatcattattatgaatattattagcattataaaacacaaagtcccagtgaccctaaaacaaatcaaaataaaaactatcccaccatactgggtgtggtgactcacacctataatctcagtactctgggaggctgaggtgggtaaatcacttgagcccaggagttcaagacaagcctgggcaaaatgatgaaaccccatcgataccaaaaaaaaaaaaaaaaaaaaagcaacgacaacaaaacactgtcccaaaataacatttgggcttcttctctgattttagtattacataagttttaattcactaatccattctttttgagatggagtttcgctcttgtcacccaggctggagtgcagtgacgtgatcttggctcactgcaaactccgcctcccgggttcaagtgattctcctgcctcagcctccagagtagctgggactagaggtgcgcgccaccatgcccagctaatttttgtgtttttagtagagacggggtttcaccatgttggccaagatgttctcgatctcctgaccttgtgatccacccagctcggcctcccaaagtgctaggattacaggcatgagccaccgcgcctggcccactaatacattctttttttgtttgtttgtttttttgagatggagtttcactctgttgcccagactggagtgcaatggcacgatcttggctcactgcaacgtccacctcctgggttcaagtaattctcctgcctcagcctcccaagtagctgggattacaggctcccaccaccacgcccggctaatttttgtttttgtatctttagtagagacggggtttcaccatgttggccaggctggtcacgaacttctgacgtcgtgatccacccgcctcggcctcccaaagtgctgggattacaagcgtgagctactgcggcaggcctagtccgtttttgtttcttttttttttttttgagatggagccttgctctgtcgcctaggctggagttgccatggcacgagctcggctcattaccacctccacctcctggattccagcgattctcctgccttagcctcccaagtaattgggattacagacgcccaccaccatgcctcactaatttttgtgctagcctgggattacaggcgtgagccaacatgcctgacctaatctgttctttaatacatttttttactgtgtatatttaaggtatacaacatgatgttatgagatacatagagacagtaaaatggttactataattgaaggaaattaatatacccatcatctcatatagttacccattttttttgtttttgtggcaagaggagttaaaatctactcatttaccatgaatctcatatgcagtacaattttattaattgtagtcatgttttacattagatccctagacttgtttatcctacatatctgaaaaatacagaaatcttcacaaatttttgtgccacctttgagcaggagccatgctaatcttctctgtattgttccaattttagtatatgtgctaccaaagcaagcactaaacaattatttcattatccttagcaaactaagacaggaacagaaaaccaaatacagcatattgtcacttataagtgggagctacatggtgaggacacatgaacacacagaggggaacaacagacacaggcctatcggagggtggagggtgggaggaaagaaaggatcaggaaaaataattagtgagtactagcttaatatgtgggtaacaaaataatctgtacaatgaactcctatgacacaagtttatcctaacaaacctgcacatatgccccctgaacctaattttttaaaattattttatacatgataactgtatttcaaatagaaagttctctctcctttctcaagtgcctctgttcttccagcagagggtgctgttgttataggaagttgaaagagcacatagagataatagcaaaggccatccctccacttgtctcagccatgcctgaaagccccaagtaggtggctcacattgctgcaagagacaatgttgctgttcaaaggccaaacaatacctgtagacatttgagctctcaggcagggctgcatccaggctgacagggctgctgctgttcctctcactgctttcatagccagattccattcgctggattagtcgggggtgctgctctaaaaggtgagagcctggccgtgctgggccccagcgcttgtactgggggcttggtccaccaaatttaatgtcgtaagaaggtggcttgcttggttcatctggtataaattctttagctatcccaatcaaaagacaggtatggaaaatgaggtagatttagcatttgcctaaaatcaagacctaactagctcctccctctagctacttattcactgaactcatatccctaaaacacccgacatcagagtaaaagtgccccttgccagatgtaccaaaaaacccaggttttaaaaagacataaatcaactttattcaaaagcccaattcttccctaattatctcctcacctgaatcctcagaaaaggggctaagctgggtatagccacagtgcttccttttgtccttactaaagatactgtcaatattcagagattctcgtttgggtctccatgtgggacgatacttgctggaagaactggattttgactcactgctggtactctctatttcccagtcacgagagtgtaaaggcagggtcctaggaggttttttgtcaggctggtctcctcctctgcccctgcagtgagagcctacattggtctgagaagccagggatggtctgttatggatcatattgctgactgtctctttaaaatctctcagcctgttggtgctgctggatggtttggaggcatttctaggagcctgcttctctttcagtgtttctcctaaaaacacaaagaatgaaagaaatatagatgtttaaagtgatcatggatactagaccccaatgtcgaaaaagcaaagaaaagccctctgaacagaaaggagaagccaacagtctggagcatgacagaagtttgatagagtgaatgaaggagaaagagaagcagtgcagaagggcttgccttcactgtggtatcccgaggcctggggctcatcgcctttcctcctaacccgaccagagctcctcttgcgctctatcagtgaccctttcttggatgtgtgtttctgattacattcactatcagtcaggtgtcctgaaaaaacaaggaaattggggtaagctggtatctgagactaacctccaccctcctgagaacctacctaatctccctttgggagtgccacaaatttagagtacccatggaacagaagctgtagggcataggctatctgatttcagtgtaggaacctcccagtagataaatgcagagaagggccaggtgcagtgactcacacctataattgcagcactttgggaggctaaggcgggcagatcacttgaggccaggagttcgagaccagactgaccaacatggcaaaaccctgtctctactaaaaatacaaaaattagtccggcatggtggcatgtgcctgtagtcccagctactgagaggctaaggcattagaatcacttgaacccaggaggttgcagtgagccgagatcacgccactgcactccagcctggacgacagagcaagactgtctcaaaaaaaaaaaaaaaagataaatgcagagaagctgggagcatccaaatttacaatgtctcctgagcaatgaccaatctcaatcccactcctaatcttccccagtgacccagaaggactaatgacatgtttctaggtaactttttaaaggcaaaagttttaaagattatataaaaatgtcaggtagccatatactttcactctcataaattgaagacagagttttccttttatttatttagcaacacatatcaaataaagtctgattttcagtacatctggtattatcctggatactccagactttgcccacaagaggtctgattttatatggctttaagacccagttccaagctttccttaattgtggatcatttaaagggcatttcaactttgattctcattcctatccccaacccatcttcacgaaacttggctccatccagagattacacttcatagttccttaatactaatcactgggaaaaccaggagagctgggctcttttatgtaacttgccctgcttcatgcccatagtatgcaaatacatgagcatgatttgatgacagcaaaagtcagattctaaaggatataagcaactaaattgctagaagccagagatgaattaagcaggtaaattaagtttgaagatatgcttagaaaaaaaaaacctaggtcaaatgcatggagagctaacaaaaatttgttttcacatgatagcatatgagaatccttatgcatattcaagtatcaccagtgtagtgatatggatacatattttcaatcagttgccccttggaatcttgtattgcttttatttggtcgtttgctacctctgtgcccacaagaaagatttaagagaggaggaaataacttggaacaactaagtctttttttttttttgagacggagtctcgctctgtcacccaggctggagtgcagtggtgcgatctcaactcactgcaagctccgccttccgggttcacgccattctcctgcctcagcctcctgagtagctgggactacagacgcctgccaccacacccagctaactttttgtattttttttagtagagacggggtttcaccatgttagccaggatggtctcgatctcctgacctcgtgatccacccacctcggcctcccaaagtgctgggattacaggcgtgagccactgtgcccggccgcaactaagtcttacaaatgttaaaccaatgggcatgttcaaaccattaacacaaatctgcctctactggaaaatatgcttagtttatcctgtggcttggcttctctctggttcacagcttcaaaaagtgggtctaaaaaactcacacctgacacaatcaatgcagtagtcatcaaaagaaagccagcacaagtctgacaaaacctctaggtccaactaccaatttacaagaaatataggacacagaaacgtgttaaagtataccataggaataaaatcagcaaaattcagaatgtgggaaatctacaggacaaaatacctagttctagcaataaattgcaaggaaaaaaaatagaggaaaaaacagtagattaaaagaaatgcaaaggacttatcaactcatcagaatgcatagacctcatttagatgctgagtcaaacacataaaccatgaaaatattatgatacttataagtggatatgtgaacactcattggttacctatcagttttaaggaatcatcattattatttttaagtgttacaatgctgggctgggcacggtggctcacgcctgtaatcccagcactttgggaggccgaggtgggtggatcacgaggtcaggagatcgagaccatcctggctaacacggtgaaaccccgtctctactaaaaatacaaaaaattagccaggcgtggtggcgggcgcctgtggtcccagctactcgggaggctgaggcaggagaatggcatgaacctgggaggtggagattgcagtgagccaagatcgtgccactgcactccagcctgggcgacagagcgactccaactcaaaaaaaaaaaggtgttataatgctatgtttaaaaagtgatttcttatgtttgagcaaacataagatatatttatggaaaatgtgatataatgcctgggatgtgcttcaaaataatccaggagtgggtaaaggtacaggtaaaactagactggccatgagttataattactgaaactaggtgatgggtacatgaatgggcagtacactattctatacagttttgaatatctttgaaattcttgatatttaaaaaaaaaaaaagcccccacagcttataaaccaccaatctcaaacaatgagctcacaaattctcacagtccctaagaatatggacactgttctatgccttaggcattctatctcccagaataaactttccatctcagcagtcattcactgttcttccctgtattgatttcttcctctgacatgggcatactctcctacagataaacaaaacaatgcaagaatattctctgcatggaactcacaataacaaataggtatctttcattcttttgcttctctatccttcaggaagcttagcaagctgacatgcagttgtccctcaccaatcccataaataggccccttctatcaaagctcttcacttaggacaaagcctggcatgagaacatgatgatgtgcaagatcacaggggcttaatgggatactacgggaatcaagagtataggagaagaaaagcacacttcagaataatcacatcaataatcacattacaatcgtctttattgacatgctgctattgacaggagtatgtgcaatggagcatcacggttcattcaaaactgtgttgcttctttgtatcccattgaattgcccaaattctgtgccattgtgcctttgcgtaacgaacatttctgacttcccccagtttctttctccttttttttttttttgagacggagtctcgctctgttgcccaggctggagtgcagtggcacgatcccagctcactgaaagcttcgcctcctgggttcatgccattctcctgcctcagcctcccgagtaggtaggactacaggtgcctgccaccatgcccaactaattttttttttgtatttttagtagagacggagtttcaccgtgtgttagccaggatggtctccatctccttacctcatgatccacccaccttggccgcccgcctcggcctcccaaagtgctgggattacaggtgtgagccactgcgcctggcctcacagtttctttttcttaggagatctatgcaggaattgattcaggcaagcaggaccctctgtataagtccctacctgtgtcccgactgctctgagacatggaatcattttccacattatagatgactgtcccctgagaatcagaagagaagtgactgaccacagactcatggtgggaatgtttgtagggatagctctccgttgaggaatctgttcgagtgtcacttgagatggagggctccctccctgagaggaggaggaaacacatatgcaaaaagtgaggaaacagaacagtagcaaagagaaggaaaagagatggacacaacaaagctccataaggcaagaacttcctagacacaagtgtgagaaggatatgctataccatcaagccattcttcccaacacccaacttccagatcacccagacacatgtaaaattcctcccatccctttccctaccctgctgaagccctcactttgcctgccactgtgaaaaactgtgagggttttataaaacctatcgggggaaaagcagaagtgatgaaaaagttgtgaaaagtaagatctatttagatggaaagtcccaggacaacctgtcatacatagtcagttgttctcctatcccataatctttctcctatactgccaagaatgtcacttaaatttttgaattgataccagatgcatttttaatgactctgagaaattattggggctgttatatgacatacattagtataaattagttcaatcagactgcttccctctgaatacctagctgagataagcataataggacaaatgggtatttgactgaagggagaagaggtagaacaggtctgggtggggtatgaaaggtggaagaaagcaccaggtaccaagcaggagggaggtacaaaggggagaaagaaagacgtcaaagtcaagtatcttctctttcaaaattatatcaagggccagtaccagatccagaagggtaaaataatatttcttcctccttttcagtaatcaagccaaaactattaggttatacctcaaatatattataagattctgtgagctaccctagaactttagccatcaagctgaaaattgtttttacagaaagtcgttacttaagttctgaaaaattaacttagaagtgaacaactgattcataagcagaggaatattactactggacaaggaatttttcccccctccaagacagagtcttgctattttgcccaggctaggctcgaactccagggctcaagtgatcctcccacctcagcctcccaaatagctaggataacaggcatgcatcaccctgcccagctacacatttgcaattttaaaacaaaaatatctcatgccaaacaaaataactagccttgtagtggctcaaataaaacaactcaattaagtcactggtaaattgctaataaaaatcagccatcctcaccaatattagaaggttaaatattgagccttgcaaacttaatatctcagtctaaataaacataatttccttttcacttctgagttgaggccaagtgatttaggcaacactgttttgacaactgaaggaaataaaggctggcccaagttaggcttcagcacaaattggcacttctttcttacctctaatggatcctctttctccaagctaggttacgagctaagcacataattaactatgagtcccaactgtttgatcgcatggggtgaggagagaggagaggtaaagagcctggctgctcacctgaatcttcactgtcgtagcatgtcctgctgtatgactggaactcagcttggggaggcaggtcctgggtggaaactggggtaccctggggatctgcataaagcagcagcaggggctgataatgccccttgatgcatttggtcaccacatccttccatttgggcccaatctgaaccagaaacaaccagaagaacatgacaattatactttatacccacaattcacaacatatctttctgttctgtatttctaaagaaaataaaagagatgaaaagataagaattgggtaaaaaggcagcaaaaaagatctcagacctaacacttttttaattaaatcttttttttctttgctaagtccttttagaaagcactaaaatcctataggagaataaaagaatgaataaaattaattttatttctgtgaaccatcaactcagttgtaaaataggaataaaagtcctcaaaggtggatatgctacgtgagggaacttcagctgccttggtgaccaatttcttttcacagacatcaaattaagccctcactagaaatctgcatttccttagttttctcccaaatattaaaatcactttcatgaagctgaagagcagacagaaactctttcacagactgccttagaacaaatgacattcagtttcagagttcgcaaatggtaggatataaaatgtcaaactgcttagaatagacaattgaacctctcggccttagccctgtgctggattcagctctgttaccatagtggaaaagagagaacagccacagaatcaattcaacccaatcctcaaactcacaccatcttaagcttgaaccagtcacatttcttagataatgtgctgctcttggggttagacaactagcatagtgatatgttcacaacagatgtccagtaaacttaaaactgagttattaattaaaacatttatatgctcttcacatattaatataatcatatttactactttgtaagggtattttcaaataaaaaccctaaatctaaaagaacttaaataaattgccccaaattacaacaacgcaaaagagacaaagaaaagaataagggaatttgacaaatactttactatttgtggaagacactgcttaaagtctgtggattggtgtagattatagtcacaccttatctccttatctgctaaccttatcacaagcagcttcctaactcatgcagatcacataagccacttcaaccacaaactctgtggtttagacagtaccaactttcctgctttgtcattataaccctacatgccttataactatcccaaaacacatgttactctgtgatggggcacttcagggagacaacaaagaataatttacagcagccccgagacaaagtagtacccactgataactccaagatctgaaattctgaactttgtattaaccttataacctcatttgaggcattagagtgttcctactcaaatcaatcaacacacacattaaaaaaaaaaaaaaaaaaattcctctctggggtcctagcttccaagaagacaaagaaaggaaagaacatggcatgccaaaaagggctgtggctatgtgcagctcactcactgcatgaactgtgcctgaggcatgcccaaggacaaggctattaagaagtttctcattcaaggccgggcgtggtggctcacatctgtaatcccagcactttgggaggccaaggcgggtggatcacttaatgtcaggagtttgagaccagcctggccaacatggagaaactccatctctcctaaaaatacaaaaatcagccaggcatgatggtacgcgcccgtaatcccagctactcgggaggctgaggcacgagaatcacttgggcccgggaggcagaggttgcagtgagctgagatcgcgcccctacaccccaacctgggtgacagagcaagaccctatgtcaaaaaaaaaaaaaagtttctcattcaaaacatagtaaaggctgcagctgtcaaggacatttctgaagtaaatttctttgatgcctatgtgcttcctaagctgtaggtaaagctacgttactacatgaattgtgccattcatagcaaggtagtcagtaatcaatctccccgagcccaaaaggtgataacatccccacccagatttagaccttcgagtgctgacccatgagctccaccaaagcccacgtaaggagctgacttctcaggactgaagaaaaactattttctagaaaaaaaaaaaggagattatagtttaaaaaaacactttgggccaggcactgtggctcacgcctgtaatcccaacactttggcaggctgaggagggaggatcacttgagcccaggagttccagaccagcctgggtaacatctctaaaacaaaaaaacaaaaaattttaactagctgggtgtggtggccacacacctatagtcacagctactcaaaagactaaggtgagagaattgcttaaacctggaaaataaaggctgcagtgagccattatcacgcccctgcactccagcctgggcaatagagtgaggaaaccctatctcaaaaaataaagtaaaatgctttgtcacctataaatacaaaactgctgaatgcctggtgaggggattcagaggatataatagaagatacattgttcctatcctcgaagaactagccatcttcaggggaagacaaaatgataccttcatgaattcagtaggcagacagacataaaaatataaaatacgccgggcacagtggctcatgcctataattccagcactttgggaggctgaggtaggcggatcacaaggtcaggagttcgagaccagcctggcaaacatagtgaaactctgtctctactaaaaatacaaaaattagccaggtgtggtagcatgcgcatgtactcccagctactcaggaggctgaggtgggagaatcacttgaacccaggaggcagagattgcagtgagccaagaccaagccactgcactccaacctgggtgacagagtgagactccatctcaaaaaaaaaaaaaattaaaaaaaaaaaaaatatatatatatatatgttttatagaaatgtggggaggtcccattcaaaattatgaaaatgaaacactaaagacaaatgattattctttttttttgtagtcaccaaacacttcaaaaaggacttgactactcctacctccttgacatgagcatcatcaaaatacatccatttgcgaatctttgtttgaaaaaagaatgtagaataatgtttgccatagtaacagatcattccaactaagtacagttcagattgcttggcccggtcatccgtcactctgaaaaacagctgaggggaaagaagagaaaagaaagcacagtcacatattcaaccattccacatcatctctcagcagactccaccagcatttcttaagtaaggtactgacttgcttctcttcccttcagtttaagatttttgttagtttagattaatcatcagaatttaacttcagcactttgtgaggccaaggtaagagaattacttgaggacaagagttcgagaacaacctagactagatagcaagaccctatctttaggcccagtgtggtggctcacgcctgtaattcctacactttgggagggtgaggtgaacagatctcttgaggtcaggtattcgagaccagcctggccaacatagtgaaaccccatctctactaaaaatacaaaaatcagctgggtgtggtggtgcatgtctgtaatcccagctacttgagacgttgaggcaggaggcagagattgcagtgaaccgagatcatgacactgcactccagcctgggcgacagagcaagaccccatctcaaaaaaagaaagaaagaaagaaagaaattaacccaaaaagacaaaaagtaaggaaaagcaagacagatagtggccagtaaactggtatggtgatgatctttcttcatacctttcaataattttcttaccagggcctatcataagaggagccaggaaagttggattaaaaaaaaaaaaaaaccagctgggcgcggtggctcacgcctgtaatcccagcacttttggagggggaggcaggcagatcacgaggtcaggagatcgagaccatcctggctaacatggtgaaactccgtgtctactaaaaatacaaaaaattagccgggcatggtggcaggcacctgtagtcccatctactggggaggctgaggcaggagaatggcatgaacccaggaagcggagcttgcagtgaagggagatcacactactgcactccagcctgggcgacagagcaagactccatctcaaaaaaacaaaaaagaaacaattgcttttgtttttaagagacagggtcttgctatgctgcctaggctagaatgtagtggctattcacaggcagaatcattgcacactacagccttgaactccttaagcaatcctcccacctcagcctcctgagtagctgggactacaggtaggcactggtgaaaaatggagattttattgctcacagcctactcaggtaagattccttaggaagaaaacctaaaataagatcccagaaagttcatttattctcagtcatggcttaatgacattaaaaaacaataacaaaggttttctttagtcccagtattatcccagacattagttccacactgtgaatttcatatttttgggctcaggtcaccaacttttaacttcttcacctactatagcagttctagtcaggaatgcccctctttggaccttactacctcccatggttgaacacccttccctactttatactcgtataaactaacaatgaatagaacatataataactctttgaattactgatttatttttatcagtagctaagctctgcctatcctgtctttcaaggtcaagtcatcccatttcttcttaaaaactctttgccacctataaaaggaggtatatgagcacatacctgcaagcacgggtatctgtacacaaataagtttatctgtccaaaacattataatacttgtcatctaggacatacctgtttgtctagtgctcactgctcctaagcaatactaagacgcaagaactcaaagtgagagataaaggtaactaacacgcacatcacccagcttaaggcaggttcccaggctgtggataacatcttctgctaagtctgagtggtctgagtcccataccagcccaatcgtgataatctgtggagcattcatcaacacacggcgaatcctgatcctctctccacagttgctctgaaatacatatataaggctagttcaacatgtttcccactggctttgcatcaattccactgatcgatggttccctttcccactccaaaccccacccctgatttaactcactggacagttccgcagatcccccatggtgctggcattctgcagcagctcaccaaacatgcttggtgaaggtttctctcgtctttccagcatacaaatagcctgattgcttcaagatggggaatagaagggggatgatggtttgtatttagttactgctaaatcaaacattaatgtacattcctaactcacacatttgactttcttcctctgccccctataccaaagcccctgaccaggctcagtgtcccataaacacagtaagtacctctacctgtccccagatccaaagctcatagaatccccactcctcctcccactttgctggccagtactgagcctaagaaaaggggagggatgggagaggaaagaaggagaacaaaaattatttttaaattactgttctgcattcctacaatatagcacagattcagcaataaggatataaaactatttgtgtttttattgttgttggtggtggtttttttgagacagggtctcgctctgttacctggctggagtgcaggggctcaatctcagctcacagaaacctccgcctcctgggttcaagcaattctcatgcctcagccttcagaatagctgggattacaggcacgcgcaaccatgcctggctaattcttgacatttttagtagagacagggttttgtcatgttggccaggctggtctcgaactcttagcctcaagtgatccgcccacctgggcctcccaaagtgctaggattataggcatgagccaccatgcccggccaagatataaaactatttgaatgtctccaattaaagtccaataggccaggcactgtggctcacgcctgtaatcccagcactttgggaggccaaggcaggtagatcatttgaggtcacgagttcaagaccagcctgaccaacatgatgaaacaccgtcctgctaaaaacacaaaaaaattagcgcagtgtgtactatttgtaagtagctggaagtctcagctacttgggagatggaggcaggagaatcgcttgaacccaggaggcggaggttgcagtaagccgagattgtgccactgcactgcagcctgggcaacagagcgagactctgtctcaaaaaaaaaaaaaaaagtccaatcaactggaggaatgcctaaacgcacaacagaaaatcttgtaagactcaccaaagggaagtggtggagatataatgtaccatctggatgaaaggcagcggatcagaagtggcaccacagctagtacatacacactgggcaaaagagaaaaaggcaaaaccaagcaaccataatcaggaactgttttggcacccatttaacaccccacatcccaggataaagtgttctggaagaaatgtctaaaaaaagatggagctagagttcacctgctcaaacaatgtcattgcaaatttctgatgggaaatgcagtgttgggcagtacatatatcctctttggtttcatcagcaatgtggaagtgaattctcatcaggaggttttcctgacagggaaagaacaaaagcagtataccaacaatatttaatagacaaatacataaattggtaagcagcttacccatagaaacagcaacccttctggaaggtaggaatattttgatttttaaaaatttttagtttaaaaaaattataaattcatagcaagtttcaaaaatgtataggagatcccctgtacccttcacccagcttcctccaacagtaacatctgtgttttttttgtttgtttttttgttttttgagatggagtctcgctctgtcacccaggctggagtgcagtggctcaatcttggctcactgcaagctccacctcccgggttcacgccattctcctgcctcagcctcccgagtagctgggactacaggcgcccgccaccacgcccggctaattttttgtatttttagtagagacgaggtttcaccgtgttagccaggatggtctcgatctcctgacctcgtgatccgcccgccccaggctcccaaagtgctgggattacaggcgtgagccaccgcacccggcacaactttgataactgtatcaggaaatggacattgataggatccagactttattcagatttcaccagttttacatgcattcatttgtgtgtgtgtatgtatagctctatgccattttatcaagatatagaccagttccatcacaaggctccctcatgctaaccatttagagccttacccgtccaaacctaaccctaacctgtggtaatcactaatgtcttctctcatctccatcattttatttcaagaatgttatataaatgggatcacataccacataaccttttttttttttttgagacacactctgtctctgtcgcccaggcaggagtacagtagagcgatctcggctcactgcaacctctacctcccgggttcaagagattctcctgcctcagcctcccaagtagctgggattacaggtatgtgccaccacgcctggctaagttttgtgtttttaatagagacggcgtttcaccacgttgaccaggctgctctcgaactcctgacctcaagtgatccgcccaccttggcttcccaaagtgctgggattacaggagtgagcccggccagcatataaccttttgatattgcatttttcactttcccttgaggtctgtccaagttgtgtaaatcaatagtttctttttatttttataaaaatacttaatgctttgtattgctgcatagttcttcacggtacagaagtatcatcatttgtttaaccgtctactcactgaaggacatttgggttgtttccagttttttactattatgaataacacttctatgaacattcataaacaggttttgttttaatataagttttcatttctgtgggatacatgtccaggaatgtaattgctagatcatacggtagtttacatgtctagctttttaagaaactgccaaactgttttccagagtagctataccattttacattcccaccagcaatatatcagtgatccagttcctcaggagcacctctgatttggggccacattttaccctgtgatgagatatgtatcactctcaaattttcttttttttttctttttttcttttgagacagagtctcactgtgtcacccaggctggagtacagtggtgctatctaggctcactacaacctcctcctcccaagttcaagtgattctcttgcctcagcctcccaagtagctgggactataggcgcccgccaccatgcctggctaatttttgtatttttagtagagatggggtttcgctacgttggccaggctagtcttgaactcctgaccttgtgatctgcctgccttggcctcccaaagtgctgagattacaggcatgagccaccatgcccggcctcaaattttctaaatggatttacagagagtctttcgaaggttgatgtatagaacacagagttcagaagagcgaggggcactggaggcaatgtagccatatagcacatcacacttatgctagggactcagttattccctgattaattatctttagaaatggaggagcagcatcagtattagcatcacttaggaacctgttagatacagatattccgggactcctctgccgggcctactgtatcagaagctctgggggtacaatctgtattttaatgagccttggatcctctgaaggtgagagctgatgttttatgcaatgacaagcacaaaaccaccagcctaaaggaaaaataataacacactgctataacagagacattttagatccctgaaaaatcagagaaaactcctagttctaactgtagagataagggcacagcaaattccaccataaagtagccagtccctgatggagaccatcagcagtcccaccccatatcaaagagggccagaggccagcacttacaaagcactctgcagcatcatccataattcccagctggaaacgttgttcatcctggaaagtctttgccagagcactgcggagagtgtcagatggaagcactttttcactactacactgaaactggttaaagattccctatagggaagaggttagacaagagaaaaagtacaatgctgttattaaacttctatacatcctagtctgtcatgctagcatctccatgatgatagctatgaaaccaaatgtgcttcccatgggttgacatgcttgcagttagtaattaaaaataaaatcaagagtcagaatgaagggcatgatctgtgctaataaagatcctcactccttcatctgagtgtgatgccaaggacacattaggagaaaccactgtcatgaattaatgtaatgcagttacctcatttcctcttcctctaatacagacagaagtaaatgggttaggtaaaaaaagaaaaattacacgtaaacgttatcaacaaattattttctgggggttcatcctatgaatcttgaccccctttcttttaaaatttccagctaatataaaattaccaaaaagtacaaagactaatataacaaaaatctgtgagtctaatacccagaaataaacattctatcatgtttactttcatctacagataatgctaaagtcttgtttaagactgccccactctctaccagccactcatatcataaatttgttgtataatctgtttttaatagttttacatatatatccctaaataatacataggatacttttgtgtatatttgtgggttttttgtttttttgtgtgtgttcttgttgttgtttttttgaacagggtcttgctttgtcacccaggctggagtgcagtggcatgaacgtggctcactgtagcctcaacctcctgcctcagcatcctgagtaaatgggactacaggcatgcaccaccacacaccgctaactttttaattgttttgtaagagatggggtctcaccatgttgtccaggctggtctcaaactcctgggctcatgcagtcctctcaccttggcctctaaaattgctgggattacagacgtgaatcactgcgcccagccttattagtatttttcatgtaaaaagtatcacactgaattttacttgttgttttttgttttttatttagcatcgtttttgagatctatccatgatgatatagatatagacctggtacaccttttctctgctgtatagcatttttatcgggtcactaacccacatctatttatccatttctttactgacagacattttggctgtctccaattttttgctattacaaagacacaatgccaacttatacttctaccaatatatagtaaaaatttccccatattcttgtcaaaaattaatactgtgagaccatttagttttaatttagtctttaatttcgtctttctgggtcctttgtattacttgtggcaaatatattctcccaatctactgaccttggtgtatttgaatgcacatcactttttaattttggtgtaattaaatgtatcttttccatctttacctacatctgaaccctgatgaatatcatgtccaaagagtagaatcagccaggtgcagtggcacacgcctataatgccaatacttgtaatcacttgagctcaggagaacaagaccagcctgggcaacatggtgaaaccccgtctctactaaaaatacaaaacttagcccagcatggtggtgcatgcctgtagtcctgctactcgggaggctgaggcaagagaatcacttgaacccgggaggctgaggctgcagtgagctgagatcatgccactgcactccagcccgaactactttaaagttcatatggaaccaaaaaagagcctgcattgccaagacaatcctaagcaaaaagaacaaagctggaggcatcacgctatctgacttcaaactatactacaagactacagtaaccaaaacagcatggtactggtaccaaaacagagatatagaccaatggaacagaacagaggcctcagaaataatgccacacatctacaacaatctgatctttgacaaacctgacaaaatcaagaaatgggaaaggatttcctatttaataaatggtgctgggaaaactggctagccatatgtagaaagctgaaactggatcccttccttacaacttatacaacaattaattcaagatggattaaagacttaaatatcagactaaaaccataaaaaccctagaagaaaacctaggcaataccattcaggacataggcatgggcaaggacttcatgactaaaacaccaaaagcaatggcaataaaagccaaaatacacaaatgggatctaattaaactaaagagcttctgcacagcaaaagaaactaccatcagagtgaacaggcaacctacagaacggtagaacatttttgcaatctatccatgtgacaaagggttaatatccagaatctacaaagaacttaaacaaatttacaagaaaaaaaaaataaccccatcaaaaggcgggcaaaagatatgaacagacacttctcaaaagaagacatttatgcagccaacagacacatgaaaaaatgctcatcgtcactggtcatcagagaaatgcaaatcaaaaccacaatgagataccatctcatgccagttagaatggtgatcattaaaaagtcaggaaacaacagatgctggagaggatgtggagaaataggaacacttttacactgttggtgggagtgtaaattagttcaacactgtggaagacagcgtggcaattcctcaaggatctagaactagaaataccatttgacccagcaatccctttactgggtatatacccaaaggattataaatcatgctactataaagacacatgcacacgtatgtttattgcagcactattcacaatagcaaagacttggaaccaaaccaaatgtccatcaatgacagactggattaagaaaatgtggcacatatacaccatggaatactatgcagccttaaaaaaaatgagttcatgtcctttgcagggacatggatgaagctggaagccatcattctcagcaaactatcacaaggacagaaaaccaaacaccgtatgttctcactcataggtgggaattgaagaatgagaacacttggacacagggcagggaacatcatacaccggggcctgtcgggaggtggggggctgagggagggatagcattaggagaaatatctaatataaatgacgaactgatgggtgcagcaaaccaacacatgtatacctatgtaacaaacctgcacgttgtgcacatgtaccctagaacttaaagtataattttattaaaaaagtaatttattcatattaaaatatccaagttttatttttcagacatattactaacaagaccagaaataagaccattttataaacctacctatgtgatctaagaataggaggccccaccaaccttgagtggtcaattcttggttttcctcttacttgacctatcagcagcatttaactcagctaatctttaaaatacttccttcccctggttccagggcaccccttcaggttttcttcctacctcagtggtcaatggtcactccttatcagtctcctttgctggttccttttcaattccaaaactcaggccttggacctcttgacttccctaaagtcactcacattcttagtggtctcatctaacatggttttacatacacatacattgacaattcccaaaattacactaacagcccaaatctccctcctgaattccaaatttgtagttggcaaaaactacaactgcttttgtaccaacctaatgtatctaactatatattggacgtctacatttgaatatcaatgggcatttcaaatttaacattccccaaactaaatgttttatgtttcctcccaacatccacattttgccttcttgtcccatctcagtaaacaccgccaccatccttgcagttgtttaggtcgaaaaccttggaaaccacctgtgacccttcccttgctttcacaactcccatccaatctacaggcaaatcccctatttccactctcaaatatatctagaccctattccactctcaaatatatctagaccctacactgttcaccacctcatctgctatcagcctagtccaagtcatctcacctcttcactggataattgcaagtttcctgactgatccccttgtctccctgcagaaacacacagcagacaaatacagcaatcatatgattttttaaaaatataaatcagatcatatcattcttctgctcaaaactctctaaaggcttcccatggcatacacagtaaaagccaaactgctaagtccttacgtaatctggcctacgattccacttctctttgttttgttttgtttttgagatggagtctcactctgtcacccatgctggagtgcaatggtgtgatctcggctcactgtaacctccacctcccaggttcaagcgattctgctgcctcagcctcccaagtagctgggattacaggtatgtgccactacacccggctaagttttgcatttttagtagaggccgggttttgctatgttggccaggttggtcttgaatccctgatctcagatgatccacctgcctcagcctcccaaagtgctgggataacaggcgtgggccaccacgcccagccatactattctacttctggttcaccctacaccagctggcccctcactatgccccaaacctaccatgtatatctctgcacttgagttctatgcctggatcattcttcctctagatatgtatggctcaatcactcatttcctgtggattttttatccaaatactaccttctctataatagagtacttcctgatcaccctctttaaaattgtaagctccaccctcccttccccaaactccccactcttacatattttttctctatagcaattattactatctgtcatactatatattttacttgtctgattccaatattgagaatataagacataaatctttatccttttattctgtgtatattcccagcaactaggacagtactggcatacaaagtgtaaccgataactatttttaaatgaatcaattaatcattatgtgatgcaggtagatctaagggggagatattattaaaatctgtttttttttaaataagtaaggaatcaccttaaaaagcagaaaaactttcttaaggtaatattactggttaggacaaaataagactaaatttagttctgctaatttcaggtcaaaattgtttttccggccaggcgtggtggctcacgcctgcaatcccagcactttgggaggccgaggtgggcggatcacgaggtcaggagatcgagaccatcctggctaacaaggtgaaaccccgtctctactaaaaatacaaaaattatccaggcatggtggcaggtgcccatagtcccagctactgcggaggctgaggcaggagaatggcgtgaacccagaaggcagagcttgcagtgagccgagattgcatactgcactccagcctgggcgacagagcaagactctgtctcaaaaaaaataaattgtttttcccattctgccctctcactagcacctttcctcctcatacacactgaatatctactgcagcagctcaagaacagattactgtgtaacctgctattatgttcctacaaatgtctccatatgatgtgggagaggcagtgccagcaatacatatttagtattatttaataagctgtgagggaaatctgttataattactccacattattttggcttaacctagaaatttatacacaagtccactataaggtcaaggaaaggcagggcaggccttccataatttgttactggaaggggaagaatgtctatcagtaacctcttaaactagaccaaaaggaatgatctaggtccacagttaaataattggatatgtgtccagtgacctatgggattttgaacctttggagaaataaggagaaacaaaggaaaaggaagggggaaaaagcagtgactgcttttacaaattgcatagtggcctgacgacatgatgatttgttgaaagaaggtcaacccagcttggcaaaatttagtgaccactattacatcccagcctgttgctcttctcaattgttactggtaagaaattactgctgacataggctctattacagaacaaaggatggatgaggtttggtcctttgttcaaaatccaaaattggttccaaaacaaaccaataggaaattatttccaggatagttctatacaaatctgaaatttataaactctggcccctttagtcttcttcaactggatttcctcaagaattaagccctaatactctagggcctcaactgttcctaatgaaatagcaactctcctatgcatagcactagctatatggcatcttggagagaattaagaaaatagtcactctaatcactttgtgttctgtgtggttcagatgaccctgttagagaaagacagggctccactcagagacggtatggtgtaatggttaagagactggattctggagctaaaatgggttcaaaatcccaaggctgacacttcagctatatgatctcgggtaaattatttaacttcttaaggcttcagtttctcttttaaaagagagtttaataatagcatttacaccagcctgaccaatatggtgaaatcccgtctctactaaaaatacaaaaagtagccgggcgttgcggtgagcgcctatagtcccagctactcgggaggctgacacaggagaattgcttgaacctaggaggcggaggttgcagtgagctgagatcgtaccactgcattccagcctgggtgatagagtgaggctccatctcaaaaaaaaaaaaaaaagtatttactacccagggttatttgaggattaaatgagtacacacacacacacacacacatatatatataagatatacatcagccgggcgtggtggcccacgcctgtgatcccagcactttgggaggctgagtcgggaggattacctaaggtcaggaattcgagaccagcctggccaacattgtgaaaccccatctctactaaaattacaaaaattagccaggtgtggtggcaatcacctgtaatcccagctactcaggaggctgaagcaggagaattgcttgaacccgggaggtggaggctgcagtaagctgagatcacaccactgtactccagcctggacgacagagtgagactctgtctcaggaaaaaaacaaacaaaaatataaatgtatatatcctagactaatctctgtcagtgtgataagtgctaaatgttaggtattattactattattgtatttgggagtcatttcacgttgctaaagagcctgtctgtcactgtcctatgatgaaagaagggatctgagtcaggtgcttctaccttgagctacttcctcagtctctgagatctgagtaggaagaactacagttttttctcttctccattctgtttctcccactcaaaggaggcatatttcccatgacctagataacaagggtttcagtagagaaagggaaaggtcttaaggtcagagctctgactgcacccagagtgggtctgtaacaatagatctggctccccagttcagtggtatcaacgtctccacaatataatcttttctcacctcttaattacaggcagccttcctcatacacactgagaatctgaatgcattcagaatggcctctgactacatcttctttattctcttattttaattattgttgtcagtcttgctctgctattgttaggaagaagcaagtgtattaggggtaaagctgactgagcccgcccagcatgcatctgtggagctctggaagaagctgtagcacaaagcccctctgttagagcagcacactaacctctgtgtgtccctctcacatgagcacagggactggaatgggcctcctcccattctctttttcaccctcctcccacctttcccagagggagatcctgttcacaccaaagaaagccaagaacatttagttcagcagtaagaacaggtggcagcaccaataaggaacaaaaactggtattcttccaattgctgagttctatgacaggcagagagaaagggcaggaagaaccaaaacccaagaatcacttttcctgtgaggtccctgatggttccatttcaacaagtagagaaaatccaccttggagtttctctctgctcttcttcacagggtgaaaccaaagaggtcttccttttcattctcaggaaaaggcaaatcactttttgtctgttaactagtttcttggatgcagtacaaaagcaacaagattttaacgactaaaagcaggtgcttccccacccatctctcttgattaagcagcaaacaattctatccacatgagcacataattatttggattagtaaaaaccatgtaaataagatagaagtgccataaaaacagaaagtctttatgcttcgacatctacaaatgcagctgttgcttaagtatttttcccctaaaacagactcttgtctttaagtggggaacagctgtttttttctctctcaggatttcccagtcttatatctaaaagaagtcatgagtagagaaggtgaggattaaggagaaaggttgtcactaattttggtgctttttgagctcaaggtctttggaaagtgctccagtgggcagcccacttcatccctgcaataccttctgcaaaggtgtgacaaactttacaccctgccattaactcaattcttagggtttctcttctcaacctggacttcccaattttggctctcataatcactgctttcgctacatctcctgggaatcatagaacttaattggccagtctggcttctttgtaaacactaccctctgtaagtaagttaaaggagctagtccttgaggatcactgactactggaaaagagacgttcacttggttttctgtattcaaaagaatgttgaaagttgtcttttaagaggggaaaaacattttacccttttggcactcaaaaataataacataggattttaacattttattgtaaaaaatttcaaacatacaagagtagacagaagagctaaatcaactccctttatttatcattcaacttcaacaattatcaacctgtggccaatcttatttcatctataccacccatccacttaacttactctcagatcattttgaaacaagtgccaaacatttttcatttgtaaatatttcaaaatatatctctaaaaaataataactttttctctgaaacatgaccataaggctgggcactgtggctcatgcctataatcccagcactttgggaggatggcttaaagccaggagtttgagaccagcctgggcaacaaggcaagaccttgtctctacaaaaaaaaattaactgggtacagtggcatatgcctgtagtttcagctacacagttggctgaggtgggaagatcatttaagcccaagagttccaggctacagtgagctataattgcaccactgcacttcagcctgggtgacagagcaagaccctgtctcaataaataactaaataaataataatatcattatcacacacaccccaaaagttattaatgtcttaatatcatcacatatgtaatttaatacgaactcttgatctaactttggggaaggcagagaagagctggctagtttctcccttgagattctctaaccatatatctaccttctggactctcaattagaaaagcacatacctatcctttaccagtctctttaaattaaagtcaattatcaataccatatcacctcataactttaagactttatttgcattctgttcataacaatattttggacttgcaatggtgaggttaaagacaatcataagctacatatcacactcattcctgctaccagctatgcaaaatagaggcaactcacatatgcacaaagacaagagacacagataaacagtaacaccaagacttcaagacaatggacagagacagagatgggccaaattcgccacagaaaggtattgcttttaatgagaaataataagctaatgttgaggttttataaaatacagtagtcaatttactaatttttgccaagatcaaaactgcaagactcttataaattaccaacagtattcaaatcaaattttgagaatacataaccacttaccccacaggaaaaactgaaaggggacacccttctggatatgcacaaggttttgagattgtctaaactgtaggatctgccataaattctggcaaggaaagaatcatgatgattcactacatgtttccttgcagtcgtaccccttctatttgaatatcatatacaattctgaactccaaattttaaaaaaaagctgaagcattcattttatactattcaagttttgccaatggataaattagttgagaatatttaaaccagtcacagtctaataggaacttaaaactaagggaaggatgatcaaaggaccatataaatatgctcatattcatacataggtgatcaaaacaatgaagttaactcaagtagatgatatttggattagacataaggacatacttccttatgtgagagctgtttattaccagctaaaatttctagggaatatactagaaatctaatttcctggtttcaagaatcagttcagaataatgagttttctcttctctgatagtggctgtgactaaagaacaatgaagaaccttccatttctacaatctgcaaaagaaaggaatggattaataatgaacaatgggtaatttctttttttttcttttttttttttttttgagacagagtctccctctgtcacccaggcaacaatcatgcagtggcaccatttcggttcactgcaacctccacctcccaggttgaagcaattctctgcctcagcctcccaagtagctgggattacaggcacctgccaccacgcccggctaatttttgtatttttagtagagacagggtttcaccatcttggccaggctagtcctcaactcctgacctcgtgatccacccgtctcggcctcccaaagtgctgggattacaggcatgagccaccgcgcccgggctgagtaatttcttatatcattttattctctgtgcttatgcttcagtacacaacagagaaacaggcataaggtataacttgaaaaatactagagattccttgaattctcacatttcccccaattaacaagtggactacgagtaaaacacataccttcctgccccattagaacagtctaaccgctctccacatatagatattacaggataccttatatacgaaattctgtttcctccccacccaccctctaccagcaccattcccaggcttttatgccttatactagcattcttaaaagaaaaatcactaattgagaagatttgtttaatttaatcaatcaatgcacattctgctttgcctataacaaaaaacactctgtcctacatcctggcactgcaaagcctctagtacaatccctggaagaacaaaatctttgtggcacactaaatacagaggacggatttcctatcctgaacagagataaataaataagccaacaccaaagtcaagtcataccctgggggccaggggtgtaagagtagattcattgtgaataataaataagaccactgggctacaggcataacagtaacttaggtcagaaaaaatattttagtgatatgagatagaataaatttggggcttttgaggggacagggtaattagcacacaaacttcttcaattttttttttttttgagatggagtcttgctctgtcacccaggcagaagcgcagtggcgcaatctcgctcactgcaaccaccacctcccaggttcaagtgattctcctgcctcagcctcccaagtagctgggactataggtgccgcccaccacacctggctaatttttttttttttttttgagacggagtctcactctgtcgccaggctgcagtgcagtggcgcgatctcagctcactgcaacttccacctcccgggttcaagcgattctcctgcctcagcctcccgagtagctgggactacaggcgcatgccaccacacccagctaatttttgtatttttagtcgagacaaggtttcaccatgttggccaggctggtctcaaactcctgacctcaggtgatccacccaccttggcctcccaaagtgctgggattacaggcctgaggaagttttattctcaaaaggagaataaatgggttatttatcaaataaatgggttcagtgactaaccacatcaagaccagctcaagaaggatttaaagagctattattcttttttttttttttttttttttgagatggagtcttgctctgttgcccaggctggagtgcagtggctcgatctcggctcacttgcaacctcgcctccagggttcaagtgattctcctgtctcagcctcctgagtagctggaactacaggtgcacaccaccacacccagttgatttttgtattttagtagagacggggtttcaccatgttggccaggatggtctcgatctcttgacctcatgatccgcccacttcggccccacaaagtgctggaattacaggcatgagccaccacgcccaatcttcaatttttaagtcagaattgacaggcatcatggttcaaagtaagcagaatgacatactgacacaaactattttcaatgaaaggcataattagtaacttgcatgcaagattttgaggctgaatttgctgtagggacttagtatcaagtaacacagaaaaaacccagtacattttacagaaccaaaggaaagggatcataaattctatgtacaaatcaaagtgattataagtactggatacaatactatacaattgcatacaggcatgggattgtattatagtatacattatagtatacaatactatacaaatgtataaaattgtatacaggcatgaaccaccgcacctggcctcaggaatatatatctttaagccagacatggaaaggcaagtccctcatctaaacatcagactaagggaaagttggccagcctctgattcatctagaaacatgttagtgtttccttttgtccttaccagtggttcctagagtgaataattatgctccaaataaaagaaatctgactttacagaattggcaagtccttataaagctgactcttgaacaactcagtggttaggggaactgaccccatacagttgtaaatttgtgtataacttttgacaccccaaaaacttaactactaatagtctactggaagccttaccaataatataaatacttgatcaatattaatacatagactactatctacatatgttatgcatttgtgacataactttttcttaatttttttgatatttctaggctacatggtttgttttttcaaattgtcacaaatctcaaaaaattttataatatatctattgaaaaaaatacatataaatggacccacacagttcaaacccgtgttgttcaacggttaactgtatttcaaattgagaaagtttggagtttcctgttttgaaaaacaaaactacaaaacaagaattttacaaccaggcatagttgctcatgcctataatcccagcaccttgggaggccaagacaggtggatcacctgaagttgggagctcaagaccagcccggccaacacggtgaaaccctgtctctactaaaaatacaaaaaattagtaggctgggcgcggtggctcacacctgtaatcccagcaccttgggaggccaaggcaggcagataacctgaggtcgggagttcgagactagcctgatcaacatggagaaaccctgtctctactaaaaatacaaaattagccaggcatggtgacacatgcctgtaatcccagctactagggaggctgaggcaggagaatcacttgaacctgggaggtggaggttgcgatgagcctagattgcgccattgcactccagcctgggcaataagagcaaaactccacctaaaaaaaaaaaaaaaaaaattagacgggcgtggtggaaggcgcctgtaatcccagttactctggaggtggaggcaagagaatcacttgaacctgggaggcggaggttgcagtgagtccagatcgcaccactgcactacagcctgggtgacagagccagactccatctcaaaaaaaaaaaaaagtattttacatatcagcttcacattagagaatgcaaacagggccgggcatggtgactcatgcctggaatcccagcagagtttgggaggccaaggagggcagatagcttgaggttaggagttcgagaccagcttggccaacatcgtgaaatcacatctctactaaaaatatatacaaaaattagccaccacctactggggagacagaggcaggagaatcacttgaacctgggaggcagaggttgcagttagctgagatagtgccactgcactccagcctgggtgacaaagcgaccccatttcaaaaaaaaaagagggaatgcaaacagatcttaaggattcagcaaaaaggaattcttattagcctcatcaaacatccctctaatttttaaataggaagcagtgaaaaaatgggatttaagtatataaaattatacccacactggaaacaccacaagataacatgtaacttaaccacagaataccagataaatgctttgctgacagaatcccaggcctgctttcttctttcagcaggtcttttccatcatcactctagcctcacccacaatacacacatatttcacccttcccttaccaaatgagaaaggcctactaaaaaaagtgagaccaggccgggcatggtggctcacgcctgtaatcccagcactttgggaggtcgaggcgggcggatcacaaggtcaggagatcaaagaccatcctggctaacatggtgaaaccccgtctctactaaaaatacaaaaaaaaaaaaaaattagccgggcatggtggcgggtgcctgtagtcccagctactcaggaggctgaggcaggagaatggcgtgaacccgggaggcagagcttgcagtgagctgagatcgcgccactgcactccagcctgggtgacagtgcaaaactccgtctcaaaaaaaaaaaaaaaaaaaaaaaaaagtgagaccaaaagtcacaggatgaaaacctctttccatcaaataggacaagagtgagaaaggtcataaaagacaggaagaaaaatggaaggcaactaccaaaaactccgtaactatttaataaaatccaagaagcccgggtacggtggctcacacctgtaatcctagcactttggaaggccgaggtgggcagatcacaaggtcaggagttcgagaccagcctggccaatatggtgaaaccctgtctctactaaaaaaatacaaaaattagccgggcgtggtggcaggtgcctgtaatcccagctactcaggagtctgaagcaggataatcgcttgaacccgggaggcagaggttgcagtgagccgagatcatgctattgcactccagcctgggcgacacagcgagactccatctcaaaaaaaaaaaaaaaaaaaaaaaagaaatccaagaactaccaaaagattctatcaacccagaaaacacagaaaagtagagtgtttatagtatggtccaagcactgtactaggcactgtgagaaataacaagagagaagagttgagctattttcccaaaaattcattcagccatgctaaatactattaagtcaaacaatcatagttctagatagatagcatttctaaaacttcatgaagggcagggcacagtgactcacatctgtaatcctagcagcttgggaggccaaggcaggaggatcacttgaggccaggagtttaaggccagcctggacaacatagcaagatcctgtctccattttttttaattaaaaaatttaaaatttaaataaaacttcatgaagaagctaacttctgaagcagagttctgaaaagtgaatgtggtttggcaaaagggaggcaaaacactccacgcaaagtgaatggcatctgaaatgtctaagaggtagacatagcaagtgcattgttatcacagttgaaatgcagaatgcccagggaaggaaaggaaagaaatataaaattaagttttaaaatgtttgtaatcatgcatttttaagtgatttaagaaacaagtgggagccacttcaggattatgagaagatactaacttcaatatagcattccagggtattcttaggtttaaaaacaaatgaagtaggaagatactacagatagaggggcaatttagggatctggaaaaaagtaatctttttacaaaaacagtgggcaaaaagacttactaccagaaatacagaccagacgggaagcataaaaagaaatgacaatctgttagctgggcgtggtggcacacacctgtaatcccagctattcgggaggctgaggcacgagaattgtttgaacctaggaggtagaggttgcagtgagccgagatcatgccactgcactccagcctgggtgatagagcaaaactctgtctcattaaaaaaaagagagagagagagaaaaaaattacaatctccatgctagaattcaggcaattttcagctttcctctttacactttagtgtgcttcctagaatggttgcagtgcttttctatattttataattaaaatagtcacataaaaagagaataaacataacatatacacatacatagccaaagaataataaacacccacacacccatgtgctcaccacccaatttaagaaatagaaaaataaaccacgagtttaaacctctccaactgattacatacttacatgaaatctaccctccaccttctacagaacacaactatcctgaattttgtgaaaagcacttcctttttctctacagacttatcacatgcatgtacccctgaacaatatgttcttcagttttgcctggttttgatttatatataaatggaatcatgattcatatagtcttctatgacttgcttttttcaatcaatgtgatgttttatgagattagcccaagttgctgcatgcagctgcagaattcattttcattactatatagtgttttactattggaataaaccataatttttaaatccactctagtgtagttggaatgtgttatttccatttttctacaatctcaaaatatactactttgaacattctcaaatatatcttctggcacattatgtatcaagaagttttctacaatgtattgctaggggtggaactgcgaggtggttacatggtacaagttcaattctactaagtaatgataaactgttttcctaagtagtgatatcaatttatattctagctagcaatgtatgtaaagttctcattattccacatttttggtaacactcaatttttttttcttttagagatagaccctatctgtcactcatgctggagtgcagcagcatgatcaaggctcactgcagcctcaatctcttgggctcaagtgatctttccacctcagcctcccaagtagctgggaccacaggcacacaccgacatgcccagataatttttaaaaatgttttcgtagagacaggatctcactttgttgtccatggtggtctcaaactcctgagctcagcgatcctcctgcctcagcctcccaaagtgctgggattacagatgtgagccaccacagcctggcagtaacaattttatcagatttttaaatgtccaccaacctgaagggtatggctcaatttacatttcttagattactaatgggggcaagcatttttcatatgctcaggggttatttgggtttcctatcctgagaaaggcctgtttgtagctttgtccatttttctcttgactcatttatcttttatttatttatttacttattgatatggagtttcgctcttgttgcccaggctggagtgtaatggcacgatctcagctcaccacaacctccaccctccgggttcaagtgattctcctgcctcagcctcccaaatagctgagattacaggcatgcaccaccacgcccagctaattttgtatttttagtagagacagggtttctctatgttggtcaggctagtttcaaactcccgacctcaggagatctgcccgcctcggcctcccaaagtgctgggattacaggcgtgagccaccgcacccagccttttatttattttttataggaattttctggagttctatgctggatactaatcttttgttacatatatatgttgaagatattttctccaggtttgtagccttgtctctttgcattctttatggagtctttagatgaatgaaagtttttgaatttttgtagtaaaatttatcaatttcctaacttttttttcatgtcttatttaataagtacttccctatccctgaggtcatgatactctctcatatgttcttctaaaacttaaaaaaaacaaaaaaaaaacactgagacagagtctcactctgtcacccaggctggagtatagtggcacaaacacagctcactgcagcctcgacctcctgggctcaagtgaacctcctgcctcagcctcccaagtagctgggccgacaggtgcgcatcaccatgcctggctaatttttgacttgttgtagagacaggatctcattttgttgcctaggctagtctcaaactcttaggctcaagcgatcctcccaccttggcctcccagagtgctgaggttagaggtgtgagtcacattttagtccttaatatctgaaattcttacttttggtacggtatgaaataggaaactaatttccttttttcttttccctatagggagaactaattgtctaaacaccatttattgaaaaatccattttctccttagattcacagggcaagtagcaagtttcctatatgactatttctgaactacaaattttgttccattgatttatttgccatactgtgtagataccacattatcttaattattagttttataattcttgatatctggtaaagtatgctagtcattaatactgtttggcaaatatctctggtcttacccctctcaaggatcaccataggactacagttccaggttcccttgtgggtcaatgggacaagattaattctgtttcaatgagctgtgagcaaaagtgaaatgacctgctgagcatttaactgcctgtgcaaaatcctccagagctcttttttccctctggcttagcaactaatattttatatggtggtcaagcatagtggctcatgccagcaccttgagaggccaaggtgggaagatgacttgaggccaggaattcaagaccagccttgggtaacatagcaagtcctcatctctaccaaaaaaaaaaaaaaaaaaaaaaaggagttgggcatggtggcacacatctatagtcctagctacttgggaggctgaggcacagaattgcttgaccccaggaaactgaggctgcagtgagctatgactggtaccagtgtactccaggctgggtgacagagcaagatcctatctctaaaaaataataatactcaatatgattgtagctttggtacctaagtgatataatcagtagtatccctacttatctttagtgaatgagaaataaatctttggtatattaatcacagggattttatggttgtttgttaccacaatataatttagcatactctgggccaggaatggtagttcatgcctgtaatcccagcacttttggaagccgaagtgaaaggactgcttgagcccaggagttcaaaaccagcctaggcaacatagtgagaacccatctctaccaaaaatttaaaaatcgccagacatggtagcacctgcctgtggtcccagctactcgggaggcagaggcaagaggattccttgagcccaggaggttgaggctgcagtgaaccataatagccccactacaccccagcctgggcaacagaacaagatcctatttcaaataaataaataaataaataacttagcctacctactctgaggtcactcactctgttgttacttttcagcagtgtcatatttttccgtttgttacgtaaatttcagaactgtcttttctcaacttccaaaataagcctactgatcagagtatacatgagtaccaccacactggaaaagaaatggcattatctaaaaaagttgaagacatacatattctatgatctagcaattccagtcctgggcatgtgtacaaaagaaatatgtacacataggtaaacatgtacaaaaatgttcttagtaatactcttcataaaaataaaaaactggaaacaatccaaatgactaccaacatttggtagttggtagtcatgttggtagtcatctggtagaagagatcaccaacagtgatttatttacacaaagaaataccaaggccaggcacagtggctcatgcctgtaatcctagcattttgggaggccaaggagggcagatcacctgaggtcaggagttcgagaccagcctggccaacattgagaaaccctgtctctactaaaaatacaaaattagccgggcgtggtggcgcatgcctgtaatcccagctactcgggaggatgaggcagaagaatcacttgaacccgggaggcggaggttgcagtgagctgagatcgcaccattgcactccagcctgggcaacaagagtgaaactccgtctcaaaaaagaaaagaaaaagaaataccatacagtaatgaaaatgaactagacctacacacaacaatgtagatgctcttataaacacattgctgagctaagaaacacacacaaaatttgcatacaatgattccatttacaatgaagtctcaaaaacagataattttaaaattagattaagaataaatatataggtagtaaaacaccagataaaacaaggaaatgggccaggcgcagtggctcacgcctgtaatcccagcactttgggggccgaggcgggtggatcacaaggtcaagagtttgagaccagcctggccaacatggtgaaaccccatctctactaaaaatacaaaaattagccgggcatggtgacgtgcacctgtaatcccacctacttgggaggctgaggcaggagaatcacttgaacccaggaggcagaggttgcagtgagctgagatcatgccactgcattccagcctgggcgacacagtgagactctgtctcaaaaaaacaaacaaaaaaacaaaacaaaaaaaacaacaacaaggaaatgactaccacaaacattaggaagtccctgggagaaaagagatctgattgagaaaaaagggaggagaatgtacatggtactggcaactttcttttgtttttttgttttgttttgttttgagacagagttttgctctgtcacccaggctggagtgcagtggcacgatcctggctcactgcaacctccgcttcccgggttcaagtgattctcatacctcagcctcctgagtagctgggattacaagcatgcgccaccacacccagctaatttttttgtatttttagtagagatagggtttcgccatcttggccaggctggtcttgaactccttacctcaggtgatccacccgcctcagcctcccaaagtgctgagattacaggcgtgagccaccacatcctgccggtactggcaattttctattttgacttgaagagttactgcaagggtgttgactttgattactcgttatactggatttctgtggttttacacaaatgtcttataccatttttgtaagatttattcatatttactgcatatactttgttgctattataaaatgctttttaaattgcattttctgtttgttgccagctatagaaaccgtactgggctgggtgcagtggctcacacctgtaatcccagcactttgggaggccaaggagggtggatcacctgaggtcaggagttcgggaccagcctggccaacatggtgaaactctagctctactaaaaatacaaaaaattagctgggcgtggtagtgggtgcctgtaatcccagctactcgggaggctgaggcaggagaatcacttgaacctgggaggcagaggttgcagtgagctgaggtcgcgccattgcactccagtctgtgcaacaagagtgaaactccatctcaaagaaaaaaagaaacagaactgaatgttatgccttgatgcaacaacccactatactctctcattgctgcttctgacttatcagtagattgagtttttttgtaacagtcatatcatctgcaaataatggcaactttgtttgatcctttataatctttatatctttcctttggttttgtcttatttacaatgactagaatctagttcagtgatgaattgtattattttcaataaaagtatttttattttttatttttttagagacaggatcttgttctatcaccctggctggagtgtagtggcacaatcatagctcacttcagtgttgaactcctgggctcaagtgatcctcccacttcagcctccagagtagctgagtctacaggtatgtgcgaccatgtcccactaatttttttttctttgtagagatggggtcttgctatgttgcctaggctggtctcacactgctggcttcaagtgatcctcccatcttagcatcccaaagcactgggattacaggcatagccactgctcccagccctataaaagtagttttaaagtggggaacaaaagagacatcgtacaggaggacccaggtgctgatggctcatttcaagtttactccttcatatgtttatcatcctttcccttctctcagaaaatgaagctctccatcctggatgagggaatagctcttgaaaactggctattctaacaatttaaacttcttaactattaaaatcaagttcagctcatccacacttccaaattagtctatctgcattacaagtctataattttcaaatcaagtatacaataattaaaagaatagaaacaacgccatctaaaacgtgaagtgtgttcaaactagagcctaattatttaacatctatatagcactgaggaactgaaaagcccttaggggaaaaaaaaatcaaattttaatacactcccaacacaacaaatgaagcagtgaaggaaaataaatctcttggttagatcaggcagtgatgtaatgaggaaagtaccagaattctaacacatccccagagttatgaagacccaaaatatagcctttgataaatacatccccaagcccatttatctatccaccacaagcaactgtctctctgaaagagtcccaaaatatttcctcagcccaacaaattgacaatttcccttctgtacttgtgtgtctcagagggtaagtctagcggttgactttcttcatctttctggcttatataatgatactgatttatactaagtaacaatttgtccctcaggaaaatgaaatataacaagaatgtggcagccagttctccagagtcccacccagatcaatgaagagtatagcacagtcccgactagtcaaaggactatcagaggtcatgtaagtgctctcatcccttcttggtacagacaagagtttccagtgtcagacagttcttctatagggacttctccaggatgcacatttccctagtaagtatccccaaacacgtttttttgtttttttctccctttctgaatgactttttttgttgttgtttttttctccctagcatggctctaatgccatgaatcagacttcctctggacttaccatgggactactgtatttcttgtttatctaaaattagatacttaatgtatctttcagaaaatcagataaaatgccctttggatggacccctgtctaaatgggcacagtaagaaatgttatattcaacttgtaaaagatttggttttattaaaattcatatttgaactccccaataaaccaataatttatattctatattttgttacaagttataatggttccagctgggcgtgatggctcacgcctgtaatcccagcactttgggaggccgaggcgggcgtcacctgaagtcagtgagaccctgtctctactaaaaatacaaaaattagctagggcgtggtggcaggtgcctgtaatcccagctactcgggaggttgaggagaagaattgcttgaaccagggaggcagaggttgcggtgagccaagaccacgccattgcactccagcctgggcaacaagagtgaaaatccgtctcaaaaaaaaaaaagaaaaaaaaaaatctgcctatcatgggcttaaaactccaaagtgagttgggtgtggtggcatgagcctgtaatcccagcctactcttgagcccaggagttcaagactagcctgggcaacagagcaagatttcatctccaaaaaaaaaaaaaaaaaaaaaaaaaaaaaaaaaaaaaacaccctccatagtaatactggtcaaaaaaaattttgagtcagttattgcaaataactaatataactgggaaaatctaaagtttttggttacagttcctatttcaggatgtaaaagcaactattataaattaaacatataacgatcacatccaaacatccctgtaacaaaccaagaattcagactttatgagaccaaaaatgactgtggaagcttactcagaaatcagacagactcatccatataatccattatatatctggactaagaaactgtagggaaactacatgttggagaaacagagaaagcaacagaattggcccttacacatcatagctctttctctttagcaacatacctaaaatctctaagtcagaaatctctcactttaggccattttctttgctctaaagaaatctctggtttcattttattcagaaatgaaaaacttggaaacaggtggggaagtaaaaaaaaaaacagaaatgaaaaacttaaaactaaacaatacatggggtagagaactggtataaaagaatcttttaagtgtggtaatgggaaactagggaatagaaaaattttagtactggcattactctcttttcctttttcttttttttttttttttttgagccagggtctcactctgttgcccaggctggagtgcagtggtatgatcagaactgcagcttttaacttctaagctcaagcaatcctcccaccttgacctcccaaaggctgggattacaggcatgtgccacctcacccgttgtactggcatttatcaataggaagagtttattgctaaatttagctttaacaaacaaaattaattacgttaaaaacacctagttgcatcttctttcaaaatgaaaatttagaattagcttttcaaataaacactcaaagtagaagcaggctgggcacaatggctcacgcctgtaatcccagtgctttgggaggccgaggcaggcagatcacctgaagtcaggagtttgagaccagcctggccaacatggcgaaaccccgtctctactaaaaatacaaaaattaaccgagcatggtggcacacgcctataatcccagctactcgggaggctgagacaggagaattgctggaacccaggaggcggaggctgcagtgagctgaggtcgcaccagtgcactccagactgggtgacagagtgagacttcatcccaaaaaaaaaaaaaaaaaaaaaaaaaaggagaagcatacttgcatagtattctatcacatcaaacagagctgcataagcaaaaaaggttcagtaaaagagactacccaagccaagtactaattctttgaagcaagcaaacaaatcatatccatttttgcactaaaccacaggtagataattcagtaacaaattctttggcatcatcctgattaaccaaaccaccttgatattgaccatttggccacccaatggtagtgagaagaaactaattggaagtacttaccttgagagcgcaaaagatgcaggaatctcccatgcacttgtgagttgtaagctgcctaaagctacgtcggaagatatccaagtgccacaaaacctgatgagaaaaggaaaatatttcattactctataaaaagctaccatttaattttaaagtaaagagttcaaacaaacataggtaatgactgcagaagatgtctttattcccaaaagaaaacttcattctagtatattaaaacaaatgtgaaaaaaggtgaggtatctaacaagaaaaataaatggtcatattctgggaaagatattaatttgaacataaagtgaaggtaatacagttaaaatatgacatgatatacatcaaatgtgatccggaagaggaaatttacgggttaaagctgaagaataaggatttatattcattatccacacaagaaaagcaaaaatattttaaaacttatattagaaatgtgaactgtagaaatgtgagctgtagtgtggaattttatctttgttaggactctcaattttcagacatttctaagagaagtgtgatctccttaagtcaatagggtaaaaaataatgatttttatacttttgttgaaatgggaaaaaaatatgatattaacagtggtaaatcatgttatagtatatacccttgatgcaatgtgttgagaatggcactatacttttgtggtcttcctccctaaaacctatgaccctagtctaatcatgagaaaagcattagacaaattccaataggggaagggggatatccaaaaaaatacttgatcagtactcctcaaaactgtcaaagtttatcaaaaacataaacattctgagaaaatgtcacagctaacaggagcctaagaagacatgacaagtaaatctaaatgtggtatcctggatgaaatcttgggccaggaaaggacaccaggtaaaaactaaggaaatctgaataaattgcaatttttagttaaaaaagaaatgatgtagtatatagcataatgccttaggaagctcccccttgctaggaaaacatttaatgtcataatacatgaaaaagcataatttctggagccccagatgacagcacacctccggagcttcttcttacttatatgtctcaagatacacactctaaaagttctttgaaactggctatgctcccaagtaaataacacctttttataacaaatgtaataggttcaactcatctgtggtaaacacagctttgaaaccaaaagttagaatattagctcataacaacaattattttcaacatgtaacatgattattatagggactccaaaaccatcaatgcctcaatcattaagtatggatacagaaatatgtatgtgtatatatattatgtattgtatatggcactggaaattagaatgggaaatcataaatagtattgtttcaactgacaatataaatagaccacatagaaaaaaacaattacaaaaatgggactatggccaagacacgggtaaacaaacacatttatatcaatgccttattttgcctgcttctaaatcacaaaagtattatcaggatacaaagtaactaaaaaaactaatatgtggccaggtgtggtggcttatgcctataatcccagcactttgggaggacaacgcaggatgatcatttgagcccaggagttcaagaccagcctaagcaattatagtgagaccctctctccacaaacaattaaaaaaaaaaattagctgcgtgtggtagcatgtgtctgttgtcctagctacctagggaggctgaggtgggaggaccgcttgagcccaggacgttaaggctgcagtgagctatgattacaccagtgtactctagccttggcaacagagtgagacctctggctccaaaaaaaagagaaagaaataaagaaagaaaactaatatgcatcatccaggacaaaaacctaaccaactccacctaactacatgaaatttgggtaataattagggaaagcacttaaattttttctataggcttgccagcacataatttttttttattgttttcgaataaaaacttaaaaactgagaaagaggctgggcacagtggctcacgcctgtaagcccagcactttgggaggccgaggtgggcagattacctgaggtgaggggttcaagaccagcccagccaacatggcgaaaccccgtctctactaaaagtacaaaaattagcccagcgtggtggtgcacagcctgtaatcccagctactcaggaggctaaggcaggagaatcgcttgaacccaagaggcggaggtggcagtgagctgagatcccaccactgcactccagcctgggcgacagagtgagactctgtctgaaaaataaataaataaaaactgagaaagagcatgaaacttttattacctagataagcttggcaacattcttgtattatgaatgaggaaactcagacactattacctgtacaaagtcacaagactagtctacagaatggctaaaactacaacccaggtctcctcctaatgcccaggaccattgttctttatactaaatatcttgtcttctctcatagcaacccattttctcataacatctgaggagtgaagctaatattttacccaagtataattatcttgggtggcaaatttcatttacttttacactgaagagcagaaaagaagagaaagtaattacttgaaagttaggccaagggggatgaacttaacatgctatgggcgtgactgggcagagcagacagacagaaagctttgggattctaagatcactcaagtggcaagcaacagtgaaagggaaaatgtagggtagataatcaacttaagggaattcactttcccctagctctgttcaagtgtatctgactagacaccagttatgagccaaaacaggagagctcaaagagaggagataagttggacaaagactagactccattcaatatgtgggccaaaagcctgaatattaagagacgagattaacatacctgaaagtctttgacttgtggaaagaattttgcttctatactagagaaaagcaactaggataacacaccttactcccgaaaggagaaacagaaaacaggccagacacctgtaatcccagcaccttgggaggctgaggcaggcggatcacttgaggctaggagttcaagaccagcctgcccaacatagtaaaaccctgtctccactaaaaatacaaaaattagccgggtgtggtgatgcacacctataattccacctacttgggtggctgaggcatgagaattgcttgaacccaagaggcagaggttgcagtgagccgagatcgctcatggtcccagctactcaggagactgaggcagtaggatcacctgagccctggaggtcaaggctgcaggagctgtgattgggccactatactccagcctgggcaatagagtgagactgtccaaaaaaaaaaaaaagaaagaaaagaaaagaaaagaaaaataggaacctgtagagactgttcaggaaaaaaagttgataaatagaaagataggccaggcacggtggttcatgcctgtaatcccagcactttgggaggccaaggcaggtggatcacaaggtcaggagttcgagaccagcctggccaatatggtgaaaccccgtctctactaaaaacacacaaattagctgggcatggtggtgggcgcctgtagtcccagctactcgggaggctgaggcaagagaatcacttgaacctgggaggcggaggttgcagtgagccgagattgcgccactgcactccagcctgggcgacagagcaagactctgtctgaaagatcacctggtccatttacctccctttaggcatgtaaataatagtagttacagttattattatttctcttatcattattaatccctcttttttacaaatgaggtaattgagattcaaagagataaagtgacttgccaaagatcacacagataaatgtaaaaattatctcaggttactaacctcaaacagagactatcaaacattttatttaaaaagagttatcagaaatacagcatcagcaattaaaagtcaaagttcaccaaaaataaagaaatgacccttacctgcagggcactgttgaggaagcagctgttttgccctggctcattgctgaggcctttgctgggggctatggaggttgagcttcgaggtgcaaacatcccttgtacactaccacgaccccctgaaaaataatttctcttccaagacattattgttcacatttagcctgaaaaaaaaatggagaaggatttgtgcctttttggcaggaatttctgtctgctaaagttctaaaaggaaagggaatccagaatttagtgaatttattttggaagattttgactttaccaccttccaaatatcatctgtgtagtcaagggactcaggtatcctcctagatcaagatgacagagccctccctcacttgttccaaacaatctccaaaatgtaacatggcacaggactaatgcaaacagagaaatccttaagtattgcttccttctatttttcttgaacagcctccataaagtcctggtgaagtggatgtaattctcaactccaacagcatccaggatcagggtaagatgtgttcttcaggcttgttgataatgcttcttatggactgaagatttttccaactggaaggagaggcagacagagaagcaagaatccaacatgatcctcctcaccctctattgccttgtctcatcatcctctgaagcaaaaactcaaattctgagcaactgcaaaaggttccacaaagccaagaagaagcctgtttgaatcatctgaggtttttgttgatgttcttgctgcttctttttaatgtgccccaaacttctattgtcccatccagatcttcagcaagtctctcctctttcttctgggactagaatagccagctgtgtcagagagctttaacagaaataaaaaaaatcaaaagcttgcgtcacttaatgactctactggctttggactgttctgccaagatcaacgttgcctcacttctcactataaacttgaaaccttggcaaacaatgccaaaaaaaaagaaaaaaagaaaaaaaaaaaaaagagagagacacccaaactaaagagaaggaaaaaaaggtatgaacagctttactttcaggggaaaattctctgaaattttcttgaagcagaagaaagttgatctggatagaaataaaaacaaaatacaaactttccagtatcaggctaacacaaaacaaatcaccaagtaagcacacacaaactaggaactgaaagttccttttggacattgtgaataaagcactttttaaaaggtgttttccatgaatatgcttatgaaaacgtgcttaaaggtgggaaggccatgttagcagtctaagatctgttctgagtaaagatgttccatccagagaaacactgatggcgagtaaaccacatgtccttaacatgcagtccaagagaactaaatcttctcctgccctgtttgtttgtttgtttcatttttgccagaggatcagagagataatttgggttacaaatcatttaatctccagattatatccaagggctcacaatcagaggcaatccattgaccaactttagttttcaactaattaaaatgccagtgaggcaacagagagtaataccaaagcaagtatgttccctggaaggaaatcaccacatctccagctttaagttttcctataaggctgccatgtccatctacataaggaaaaatttttaaatgttaagtgttaaatttgccaacatcaacaattcctcattctcccttccttctcaccatcatatgcaccatctaaaaacacaaaaatgctttaacatcttaatcattctctgggagatcacctagcattgtctacagcatgtccaatggaaaaactgaggtacaggaatattaaatggttgcataagactgttctttcccttctgtaaattcccagactatttataatctacatgtcccaattaaagtatttgattatacagcctactgtcacattattctctatttttattactctctgttttatatcgtatccgtcataatatgactacatgaaatgaaatagtagctacagtcaggtatgtgctaaacacgatacttatgtcctttatttaatattcacaacagtcctatcagatagctattaatagttccattttacagaaaagtaaagagaggcttaaagacattaacttgcccaattcaacactggtaagtggcagatctagaaatgtttgactattaaacaatgacttaattatatattttattattctattccaaaagctcctattacagtgccagtcataagaaggcagtcaataaatactgcctgatgattaacatgacactagaaaagaacccatatctcccacacagactataagaccctcacctttctacacacaccctcatacacaccccactcaaggccactaagcaacttccaacaagccatgcagcattccttcagctcaactgctgcaaaggaatgacaagtaccaagcctccactttgctcacagccaaaaggacttggcaggcaggtggggtttccaatatccacattaggagctaactgaaactcagcctgccctatgacacacactcctgagtacagggagcaaaaggagaaaaacgcagtagcagagaaaagattctcaggctctgaatggcagtattatgtagggtaaagcagtaagttctcagacctgttctagatgtgtcaccaactagaagtgagagcataaaggaccagacaagagaggcagtaacaagtggtccagagaaatactaacaccaaaaacatttcacttaaattgtagatatagcattaaacaatgtaatccttctccaataccatttactgaagatatgtgaggaggggaattatagttttatctgtatggctctcactacctagttttgttttttgggttttgttttgttttgttttgttttgtttctgaggcagaatctcactgtcacccaggctggagtgcagtcgcgcaatattggctcactgcagcctccgcctcttaggttcaagcaatcctcctgcctcagcctcccgagtagctgggattacaggcatgtgccactatgcctggctaatttttgtatttttagtagagacgggatttcaccaggggctggtctcaaacccctgacttcaggtgatccacctgccttgacttcccaaatgctgggattacaggcatgagccaccgcacccagccagtcaattgatttttgatgaaagtaccaaggccatttaattgagaaatgacagtcttttcaacaaatgatgttggaacaattgggacacccatatgcaaaaaactgaacattgagtcataccttacatcttatacaaaaataattcaatacatcacagtcctaaacaaaaaacctaaaactataaattctaggagaagacaggagaaaattttataacctttggttgggcaaagattccttttttttttttttttttgagacagtctccctctgtcgcccaggttggagtgtagtggcgtggtctcagctcactgtaacctccacctccccggttcaagtgattctccttcctcagccccatcaccctcacccccacccccttcccccagtagctggcattacaggcatgcaccaccatgtatttttagtacagatggggtttcaccatgttggccaggctggacttgaactcctgacctcaaatgatccaccatcctcggcctcccacagcgctgggattacaggtgtgagccactgcacccggacaaagattccttagatacaacaaaagcataatgtataaaaggaaaaaattatagaattgaacttcatcataagaatgtctgctctttggaagacactgttaagagaatgaaaagattagtcaaagattaaaagaaaatatttgcaagtcacataatagataaatgacttagatctaaaatatatagaatcctcaaaacttaataagaaaaactatccaattttggccaggcgcagtggctcatgcctgtaatcccagcacttttggaagctgaagcaggtggatcacttgaggtcaggagttcaaaaccaacctggccaacatggtgaaaccccatctctattaaaattacaaaaaaattagctgggtgtggtggcagacatctgtaatctcagctacttgggaggctgaggcaggagaatcgcttgaacccgggaggtggaggttgcagtaagctgggattgcaccactgcactccagcctggatgacacggcaagactccatctcaaaaaaacaacaacaacaacaacaaaaaaaaactacccaattttgtttaatgggcaaaagatttgaacatttcaccaaacaagatatacaaatggtaaataagcacatggaaagatgttcaacattattagccatgagggaaatggaaattaaaactacactatacacctattagaatagttaaaaacaaaaacaaaaaaactttttaaacctgacaataacaagtgccgatgaggaatcagagcaactggaactctcctacattgtttatggaaatgcaaaacaggccaggtgcagtagttcacgcctgtaatcccagcactttgggaggctgaggcgggtggatcaccttggatcaggagttcaagaccagcctggccaacatggtgaaaccctgtctctactaaaaatacaaaaattagccaatggcaggcacctataatcccagctcctagggggcattgaggcaggagaattgcttgaaaccaggaggtggacattgcagtgagccgagatcaagccactgcactccaacctaggcaacagagaaagaccccatttcaaaaaaaaaaaaaaaaagaaagaaaaagaaaaagaaatgcaaaatgacacacttggcagttacttctaaacttaaatatatagtcatgagctgtataacaatgtttcagtcaagaagagaccgcatatacaatggtagtcccataaaattatgggattatgggacttaccttatttttactgtaacttttctatgtttagatatgtttaggtgcacatctattactattgtgttacaattgcttattttatttatttatttatttatttttgagatggagtttcgctcttcttgcccaggctggagcgcaatggtgtgatcttggctcactgcaacctctgcctcccgggctcaagcgattttcctgcctcagcctcccgagtagctgggattacaggcacgcaccatcacgctcagctattttttgtatttttgtatttagtagagatggtgtttcaccatgttgaccatgctggtctccaactcctgacttcaggtgatcctcccgcctcagcctcccaaagtgctgggattacaggtgtgagccaccgtgcctggcatctattatatttagtacagtaacatcctatacaggtttgtagcatagcagcagtaggctatatcgtatagtctaggtgtgtagtaggctataccatctaggtttatgcaaatacacttaaatgatattcacacaatgacaaaaccacctaacaccacatttctcagaacacatccctgttgttaagcaaaacatggctgcacttttgccatacttttacctaccaatcctactcctaggtattttaccataaagaaataaaaaattgggctgggcatggtagctcatgcctaaaatcccagaatgggaggacaaggctggtggatcacttgaggcctggagttcgaggtgagcgtgggcaacatggtaaacttctaggaaagtaaaagccaaaattgggatggaagcatgtcatcttattacgtatttccttgtgtaacacagttactaagttatatgtcccactgttcccaatctgaaaacactagcctcctgtgggtaagccaaaaacctttccatgtatgaaatgatggaaaacagtgggtctcaacctttttgcagtgcctcacatccagaggcagatttaccaagccactgaaacttaagcttcaggactctttctcttgcacagattctcaaggcccaatatctcattttctgtttcaaaaaatattttccttaaaggaggccctctgaattgcataagcttcaagtgtcagagaatctaagtctgccccatccacattacataaatggggcttttatagtatatgtcacttgagaaaatacataattcaaaaagctactttgaattcagtaatactaataaatttgtattttattaatcaaagaaacatctaatgttattcactgtataaaatttgtttgaactaaatagatctaaatataatatttggtccacatttggattttggattcttgtgctcacagcaagtaactccacagtcaacagggctaaattgaaaagatcattacagattaaggttgccagaattaaagacatacctctagaagctggtgacctttagaaaaaaacactttctctgtattagtgaaatacagagaatgattctttcacaagtatacacagtacagcttaatgtgctaccatttttctcaggccaaagtaataaaccaggctccagctgcagccaccctaattatcccccactgtattcttcaccaacaaagtcagcttctctcagcctgtttcggaaaaaacccaaagcagtcattcaaaggaactggcttgtgcataaagggagatgaggcctggaaggacactgggccaggaggagcctggcgccctaagagacagaggggtaaatgaggcccagagagctacaggttattagcataagagattcattatgagcagagctagaatggaactgaaatcaatgaagactagatagaatttgttcgtgcaaagcctgggaaccctttgataaaaccaggtgtaaagtgtgggaagtttctaaggagaaggacttttttttttttttgagacagagtctcgctctgtcacccaggctggagtgcagtgatgcgatcttggctcactgcaacagccacctccacctcccgggttcaagcaattctcctacctcagcctcccgagtagctgggattacaggcatgcgccaccatgcctggctatttttgtacttttagtagagacagagtttcgccatgttggccaggctggtcttgaactcctggcctcaagtgatccacccacctcggcctcccaaagttgtgaaccatgcggtggcacaggcgtgaaccactgcgcccatccaaggagatggactctttaagctaattgacttcacagtaactaaagttcaataaagtctttaaggagacactattaattgcatgtgtagagaactccatgacattaataaaaatgacagtatcaaagtatctccactaaggcatttattaactacaaaggaaaatatagtagtttcacaatggagaaacccagcagaaactaccttaaccaagtgatcaaggtcaaaataaccagtaataatacatattgacatcatgaatgccatgatatgatgcactgaaaaggacacaattatttctgtggtattcttgcctaaaccataatctcagtccaatcatcagaaaaatatcagacaaatccaaattaaggaatatttgacaaatagccctcaaactgatattgatcaatactctacaaaaatgtcaaggttataaaagacaaagaaagactaagaaacttttacagaatacagaagagtaaggaagaaaaacacctaaaatgcaatgtgagattccagataggatcctggaacagaaaaagaacaatgcagcttgtgcaagatggcgaaaccctgtctctacaaaacaaagaaaatttttttttgaaacaaagtttctcacttgtcacccaggctggagtaaaatggcgcgatcttggcttactgcaacctcagtcacctgggttcaagcaatcctcctgcctcagcctctggagtagctgggattacaggcgcctgccaccacgcccagctaatttttgtattttcagtaaagatggggtttcactatgttggccaggctggtctcaaactgctgacctcgggtgatccgcccgcctcagcctcccaaagtgctgggattacaggcgtgagccactgcacctggccaaaaaaaattttttttaattagccaggctaatgcttgcctgtagtcccagctactcagaagggtgaggcaggaggactttttgagcctggaaattcaagcctgtagtgagctatgactgtgccactgcactccagccagggtgacaaagcaagaccctgtctttaaaaataaaaaaaaaataaattacaatttaaaaaaactgaaaataaaaaaggaaaaataataatggtaggcaaactggtgaaattcaggaaagctctttagttaatagtgttataccaatactattaattcctggttctgataaatgtattatggttatataagatggtatcattagaggtaactatttttccaacttttctataaattcaaaataaaaaacattttaaattatgcaaataattcactgaagaagatggaactttgggcccaaaagggattgaggcatttgggaaataaatatttatatgtctaaaggtagatggaccaagattgatttataggaaaagaagagatgtgaacgggcacagtggctcacgcctgtaatgccaacactttgggaggccgaggcggacagatcacgaggtcaggagctcgagaccagtctggccaacatagtgaaaccccatctgtactaaaaatacaaaaattagccgggcgtggtggcatgtgcctgtaatcccagctactcgggaggctgaggcaggagaattgcttgaaccagggagtcggaggttgcagtgagccaagatcacgccactgcactccagcctggcaatggagtgagactttgtctcaaaaaaaaaagaagagacgttgacgtagtttgtgatcctacaatccactgagggttatatgtgaaacctcttggtttactgtttaatatcacagtatggcaattattgggtgttttattagttcagaaacctgtttctcagagctaaatgtgcgcagaatgaattaacagagaagtttaaaactcagcaacatcggggtaagtaaatgtaaaatgatagcggtcttgttaggatgatgaaattatggatttttttccttttttctattttctaaattaactataatttataaataatctataaactatcatttccttaaaataggggtttaaacacattttccctaaaaatagagtgaaaggacttgagaccagagataaccgaccattgagacccgtaatatcctaacaatatgaaagctggttaataattggtaactatttcctatttagaaacagagggcctggtgtggatctctatttcctttcattctattttcactgctgctgctactaaggttcagatcctcaccacatctggaccactgcaccacattactgactcattgccagtcctctaatcctacatgtcactaccacctgactcctaaaacacattccacaccatgtcactccttttcaaaatatttaatggctcctagagggagatattcttttggctggaaaagaacaatggtatttttctaattcacaggaaagaaaattaatagatggatttttcataagtttctctaccataattttttcttacctacttagtctactgctagcactacagaaacttgaacaaatagtagcaaaattaagagggaaaaaaatcaaagcagtcaattggaactattttaacaccttttttcctaactgacagtgttaagccatgtttgcactgctataaagaaatacccaaggctgggtaatttataaagaaaagaagttaatcagctaatggttctgcactgtgtatgggaagcatggcaccagcatctgctcagcttctggcaaggcctcagggagcttacgatcatgacagaccgcaaagggaagcccaggtgtcacatggcgagagagacaagggagaggtctcaggctctcttaaacaaccagatcttgtgtgaattaactgagtgagaactcactcatcactgagctattcatgagggatccacccccatgatctaataccttccactaggccccaacattggggatcacatttcagcattagatttgagggaacaaacatccaaatcatatcactgaatcatgttcatgattgtgatttttatgctgcatatttttgatattcacatattctgccaataaaattaattcctggccaggcacagtggctcacacctgtaatcccagcattttaggaggctgaggtgggcagatcacgaggtcaagagatcaagatcatcctggccaacatggtgaaaccccgtctctactaaaaatacaaaaattagctgggcgtggtggcgcgtgcctgtagtcccaggaggctgaggcaggagaatcttgaacccgggaggcagaggttgcagtgagccaagatcgcaccactgcactctagcctggtgacagagcaagactccagctcaaagaaaaaaaaaattaattcctaattataagatagaattaaatatgtctggcaccagcgtaaagtttgagaatcaccggaccttaccaccatttccagcttcatctactcattcactcactgatcaaacatttcattgatcatccattatgtgcctctcactcatcctccactccaagtacactagactcctttctttataacaaatataccctgtcctttactttctcattgtcttgactctaatattgcctctctctggaatgcctttcctctccatttattcttgctgaaaatcttaactatcctacaaggaaaagccttcccagatcattctctcaccctctcacctttccaatctcccaatttatttcatcctcctctgtgctctcagtgcatggtggggtttggattacaatactcacattctccctcatgttacagttatttgggtacgtggactacattttgtcttaagggcatctttctaattccacacagaggttgaatataataggcattgaatcactgacagtttcattgaaagagaaaactttttgtttgaaggtacctagcctagaacaaccaattctaacatcctgataaattctgactctccttaaagaaaagaactcacaaaatggccttatctagcttgagatactgctgacaactttttctaatagtgactatataaatggaaacaatatttgcttctgattcaagcttgaaaatagaaagagataagcatctacaaccataaaaagggccaagctatttgttgatttatgagctggttatcttaaactctccagcgaatagttactcaactcaaacaatttcctgagggctggactttggcagcttcaaactattacatcatgtacaacagaagaattgtatgctgataaaggacaaaaagtcttatttttcctgcacaagaacttagataactgtcatgtataacaaatttgtctaaaatttgttaaaaagtagttggaaagaaaacaaaaaggcacgtttcactttgttataattgacaaattataagaactaagaaatgacagctgcaggctacttagcccttccttataaagatctaaagttgtataatttactgacttctaaaggaagcagcatggtagtagaaagaacatagtggttaaaagtataccctctgcaggccgggtgcagtggctcactcctgtaatcccagcactttgggaggctgaggcaagtagatcacaaggtcaggagatcgagaccatcctggctaacacggtgaaaccccgtctctactaaaaaacacaaaaaaattagccgggtgtggtggcgagcacctgtggtcccagctactcgggaggatgaggcaggagaatggcgtgaacctgggaggcggagcttgcagtgagccgagactgcgccactgcactccagcctgggcaacagagcgagactccatctcaaaaaaaacaaaaagtgcaccctctgcagggccaacaatattgcagaacctcgggaggtaacatgcttttagtggagatccaaagggtcccattcctagagaacattatgtgaattatacaacttggggacacagagttagtggaatagaacaggtctcagctccaccatctaacagctgtggcatattgaccaagttattgaactaactcttaggtacttcatcagaaaaaatgtgactaataataacatctatctcataggattgttataagaattaaataaaataatgtagatacgtataattagcccagtgcctaatatgtggtaagtgtggaataaatgttttgatgatgattatggtgaggataatgatgatgaagaataagatgaatctacattccaatcctagctccatcacattcaggccatttactacctataataaatgtgatctgctgaaaggatgcaacaaaataatgtacgcagaatacttagggccaggtacaaaacaggaattccataaagagtaactgtgattatgatgactgaccatcctctatatgcattatctctcccccatctctctttctcttacaggcaaacacacacacacatataactactataaaaatttcaggagattaaactataattgatagcataaatcccaaggccatataaaaaatggggaaaagtgtatccttttttttttcttaaatgtatcctttgttgttgttgttttttgtttttgtttttgttttttgagacggagtctcgcagtcacccaggctggagtacagtggcgtgatcttggctcaccgcaacctccgcctcgcagactcaagcaattctcctgtctcagcctccatccatagtggctgggattacaggtgtgtgccaccacgcccagctaatttttgtatttttagtaaagatggggtttcaccatgttggccaggctggtctcaaactcctgacctcaagcgatccgcccacctcagcctcccaaagtgctgcgattacaggcgtgagccaccgcgcccagcctgggaaaaatgtattctaaaaccagtgcattctcaatacaattcacccagactattgcagaaactttctaactattctttcctctctaatcccatctatacaatattgcaaaagcaaactgatgaatcacaattagcttagaaaacttcagtgacaaaatacagccaaaactctggctttgaatggccttccacaatcttatcccctgcacatttccaacctcatctacccttaaaacatacaaaaagatttgttctgtgcacatgcccagttactttgttttttgtatttctcaatcaacgaatgctcctcccatcttcccagtcctacctaatactagcaatcttttccactgagcaaacctatttgaagaagtcataccactggctacttacagtgataggaactactaatagtcatacatcagcaggaaggagcagtcatttacattaattcatttcccaaatgattgtctttttaaatacctctccacaccaactgggacttctctctccctcccaggaacatcatgaatcaatatttaaccagtatatcaatactttattagaatacaaggtagaaagttacattgccttacactcaacaaatgctcattccttgttaaacaaataaatgaagaactaagtttcatgagaccaatcaaactcacatttttccgtttagagataactcagttacaggcataaccaaacagctctttagcttgtccctgaatctcctgccaaaatcatatcgcatctaaatcataccttgcgcttccaaaaggtctacagaagaaagatactctattttatggtcagtaggacaaacgaaatgttctttctaaaccctactgccaatagtagcaaactagtaatagcagtggttaaaggaacaaaaatcaatagcaatttattaggcccctggatagcaaaacaatgagttccagaaagttaccctatataataaccttctgatttaatcatttagaaccagagatttttatcccgaattttatgaatcactaagactttttaaacacttgattccatcaatgcattatttattaatcattataaatatacccgtactcaaattatttcagtacaaacaataatgaaagtatgacagtgctatcaacaagaggaaaaaaggaggggaagcaaactgacagcactggcttgactcatttctgttgggagaacactggtactgaatggcacaagcaactccagtgtgagagagcaagcacatgactgactgggagggcgacagaggataccaaagaaaggagaatatctataaagaagatttcctctgtaggggcaggaggtgaagggatgagaaggaatgaaatctactctaacagcctttacaatactcaaatgaaaacatgctaccagacttcacactttgagccagttcacatcctagctctaccacttacaattgagtgaccttcagcagattacttatcctctttcatcaggtgtaaaattataataatggtagcccacttagtgaatacaaactacatgtttggcactgcgctaggcactggacacatggtatatcctctaattctcacaattaacctgccaaatagtgattatttttctcactttgcaggaaagaaaacccatgttctttctacctatgtatagccgctttgtagagggacaatactactacctggccaggttgtactgggaattagaagtaaatgcaaagcacttagcaaggacccagcacttacctcatattaggagctcaagaaatcattactgtacgaatacaaccatcatttgaataagtgcctcaactgaacagcaatgaaatcccagaaacaagtttcctctcacatcatctaccataaagatgacttctaactagcagtagtttgggagaatccaaagctcatcacttataactgcttgaaataccaaagtatcaaccatccagtatccaaaaaaaaatttttttttaatacacacacaaatattcttagaagctcaaaacacaaaacgcaaggaaatagcccattatgaaagtgatatttgactcaatctaaatatcaaatattaaatattttactttcaaaaggatcataggcctcatgcctcaaggaagcaggtgctaatgaacaaatttatctaacttcccaaaaatcattcccagaagcatctgttaacctgaagtacttggcaaaccatctcttagaattgacaacatattgccaaaatcttagtggattttgccaacactattctgctgataggaaaaaagaatcattcagctactttccaatttagccacaaaataggctcttttttcttcattactactttaaccagtatgttaatactgaaaataggtataaagaaatcacaaataaccttcttctgtttgaaggaaatttaaaatactaaatccacaattcttgcctttaattctaaggaactcaagaaaatctatgaattttttttttttggaaaaaatatgaaatctccaaaatctaataattgtaacagagaggagggggaaagagcacaaacaacagcttgaaagatgcctcttgaaagttgagagtcctaaaatctcaatttcaaagtttaatctactgctattaaaagaaatagcttattaatcagtgcttgggaatattttttttaaaagaaagaaaacttcacaaaaactaaccggttcctgaatcttctatctatctgtttttaccacaacaactacaatacttaccagacagcacagtcaacctccagcaaaagacctctaatcacgagggtatctgtggggcaagtgatacaagaatggggagggatatgggaatagctagagctgtggggagggaaggctaggagggaggagacgactgtagctagcaacaatgagaaactgtgaatctaaaccacaaggacttcccgcagaacaggatatcagagagaaggcaattctttttaccaactaccaggaactcagcactgacaattcatgacaaagttaaaaaggtggagcttccaattaaaaacaaagtaaacttaagaaactaaccaaaagtaacttgaaaggacgttatcacaaacttcacctgaggcttaagaaaaacaattatgaagctgtttcctggggcattcctgatgacaaaggtcattaaacaataaggtttgcagggtggctgctgcttccaaagaagggccagtcccccacaaaaaaattcctttgcactgcagtcaaaaggagcacgagaagacaacatttttgtagttgtttacagaataatcaaaacaatgttattgttggaatccctaattcagaattccaagactgggcttaaattaaatcaaatcattttaataggcaaaactcctccaactgtcttaaacgagccacactattaaagaaaattattatttaaactgagccattggaatctactgagtcaattttaaaatgcttgggatctaagggttctcaaccccaaagtccacaacagggaaagatctccacccctctctcggggaagagacctagttacatcaccaagaacaaacagcaggcagagtcccacccccaaacatgtgatcagtcaaccgagaacttgcatttgcaggcagggcacaaaggccccagaggaccaacacacacccttctatgtattacctgaggttataaaacagttttattgaaagaagttgttttataagcatactgatgaaaaaaactcatcagcagaatccttgccaaatatgaaggtctgttgtgtttctataggttgagagaaaatatacgagttgactaaaaaaaagatgtaattaagatttattggtaaaatttaacaaacatgggcaatgtccaaaactaattaagctcttacattttaacaatacagtatattaaattgaagtagtcctttggccacaaggaaagtgccacaaaaaaaaaaaaaaaaaaaaagatactgttgcttttcttgttaaccattagcattctaactcaggtctcctagtggtgctaggtggaggaggaggtagtaatgccatttcaaagtgtgaaacacaaaatttctactgataagtgctgactgcaaataaagacatacaaacatcaagaccaagctcttcaatcaagtcattaaaatataggtatatattcattgtgaaactaatcaaataaaactagagtactgggacagagttacagagcttcaaccctgattacaactagacaacattacttttcatgtctcatccaggtaagggaagtgatccacagggaaatctcactctaatagattgtaatctctccagaggcccctcagaaaacacctcccataaaactctgctatgatactcacattctgccttgcataagttattttcagacatttcttattccctcttcaagactgcacaagaggttctgtgccaaatagaaagagaaccctgtatcaaccactgggcttcgccattcaaaataaattgggtaactacaagtttttgttaggtgagtgtcaaactgcctgtagaaaaggttttataggccgggtgcaggggctcacgcctgtaatcccagcattttgggaggccattgcgggaggatcatttgagcccaggagttcaagaccagcctgggcaacacagggaggccccttctctacaaaaaaaaaaaagaaagaaagaaagtttttaattagcctggtgtggtggcacgcacctctctggtcccagttactccaggctgaggtgggaggatcccttgagcccaggaggtcaaggccccagtgagcagtgattgtgtcgctgcactccagtctgggccacagagcaagaccctgtctcaaaaaaaaaaaaaaaaaaggaaaaataaaaatagaaagaaaaggttttgggtacatgattgctaactacgtcaagagggagagtgatacatagtgtttcagattattattttttaaaatagggttttagtttaaatgttcaggtattctaaagttggatgactagttacaacagtactttgtaaaactgtgcttcaacaaaacttaacaagtcatatttttcaagtactttgcagggaatatgtaacaccacaataggtccaccttagaccagaatagacaaaggtctctgaaaaaatataaatattattagcaaggagaaacaatatttaggatttgagtaaatcaatcaagaaaaatccttggagggtagtggggagggtaatggaaaagcacaggctgaaaagtcctatttggtcacattccgtagcttttcattattggtttctactagcaaatagagtaaggtacaacagaatgttcaatgcattgaaagaacattttgcttctcttaaaagtcataaaagagaaacagaggatttctctaagaaaaaccaaaataactccctctggagtaaccccaaagtcaaaccatcattgtcttttatttctgagatgctaatgataatgctgatgtcggcagtaaaggcaggaactgagtggctccgcagtaggaacacgagattggaaaataaaagactctttttttttttgagtccaagtcttgctctgtcacccaggctggagtgcagtgacacgatctcggttcactgcaacctccacttcccaggttcaagtgattctcctgcttcagcctcttcagtagctgggattacaggtaggtgccactacacccagctagtttttgtatttttagtagagatggggcttcaccatgttggccagactggtctcgaactcctgacctcaagtgatccacctgactcagcctctcaaagtgctgggattacaggtgtgagccactgtgcccagccaataaaagactctagattttagaatgtagtgacaaaatttgggaactttttaagagacaggttcttcctctgttgcccaggctggatgcagtggtgtgatcacagctcactgaaccctcaaattcctgggttcatgcaatcttctaccctcagcctcccgagtagctgggactacaggtgtgtacaaccagacccagctaattttttaaagatttttggagacagggtcttagtatgttacctaggctgagacttttaaataaactggaggattggggtggggaggggtggggaagagactgctttatatcaaatgaaagcctttatcatttgatcctggggagaggggaagcttaattcagagctgttaaactggagttctagcaaacaaaaattagagacggacttgatcttagctaataaggaacctaagagaaaatattctagcctttgactctaggttgtaaggaagaatataccatgaagtagatgaaaaacagggaaaactacataactaatttgagtctagtgggtttttttttaactttttttttttaatcttggttttgtttgaagacagagtctcactctgtcacccaggctggagtatagtgccataatctcagctcactgcaatctctgcctcccgggttcaagtgattctcctacctcagcctccagagtagctgggattacaggtgcacaccaccacacctggctaatttttgtattttgagtagagatggagtttcaccatgttggcgaggctggtctcaaactcctgacctcaggtgatccacccacctcagcctcccaaagtgctgggattacaggcgtgagccaccaagccccactggtgttttcttttaaagacagagtctcactatgttgcccaggctggagtgcagtggctagtcacaggtgcaatccctgtgcaatcagaggtgactctagtttttattctgagatttattcacaatgttggcagagcatgtgtaccttaaagagctggttgtttcactcaagtatgcattactgagaagaggaatattgcagaaagggtagagggaagagaaaaaaactgatccaaagaatacattttggagaaactttggctgttaatcacagacctgagcagcaaaatcatacaagaaatctctatatttctcatataaatggactctaaagaagagagggagataggggccacacatttgggcttctaattatagcatcattattgtttaaattcatttatttaactatatcttgcataattctaaaaagtatatcaaatagcattatgtcattatgaacattaaccaccctgtctatagaacaagggtttttaaaagtcttggactggacttaaagctcctagaaagcaagaagagtatgaaaatccctctcaagcacaccaaagaattacctaaatgctagtcttacagaaagtaatcagccgggcgcggtggctcacgcctgtaatcccaacactttgagaggccaaggcaggcggatctcttgaggttaggattttgagaccagcctggccaacatggtgaaaaacccgtcttgactaaaaatacaacaattagctgggcatggtggcgtgtgcctgtaatcccagctactcaggaggttgaggcaggagaatcgcttgaacccaggaggcggaggttgcagtgagctgagatggtgccaccgcactccagcctgggcaacagagccaagactccatctcaaaaaaaaaaaacaaaacaaaaaaaacaggccgggtgcagtggctcacgcctataatcccatcactttgggaggccaaggtggacagatcatttgaggtcaggagttcaagaccagcctgaccaacatggtgaaaccccatctctactaaaaatacaaaaattaggctgggcacggtggctcacacctgtaatcccagcagtttgggaggccgaggcgggcagatcacaaggtcaggagatcaagaccatcctggctaacatagtgaaaccctgtctctactaaaaatacaaaaaaaattagccaggcgtagtggcgggcgcctgtagtcccagctactcgggaggctgaggcaggagaatggtgtgaacccgagaggcggagcttgcagtgagccgagatcgcaccactgcactccagcctgggtgacagagtgagactctgtctcaaaaaaaaaatcagccaggcagtagtggtacgcgcctgtaatcccagctactcaggaggctggggcaggagaatcacttgagcctgggaggtggaggttgcagtgagctgagatcaggccatcgcactccagtctgagttggacagagtgagatcctgtctcaaaaaaaaaaaaaaaaaaaaaggaataaagggtttctcagtgtttatgttcaagtaactttattttacttaataatattcccaaatgcaagagtagtgatactggcaatttaacaggccatagagaagccataaggtgcttcctttaagtgaaaaagtgaaagttatcgacttaataaggaaagaaaaagaatcatacactaaagctgctaaggtctaccataagaacaaatccatgcatgacattgtgaagaaggaaaggaaattcatgctagttttactgtcacacctcaaactgcaaaaagtcatggccatagttcatggtaagtgaaaccacctttgcaaaaattataactgagaaaattattacagtgaaagagatctgacttacttgactccctgttgcttctaacttccaagctgtccttgttcattcctggacataaagcgaactaactttgggaggaacttatagtttaactttgaaacaaagacaaaaacacagccctttcccagaacaaaccctcttcttgcctggggactagactgcctttgcaggactaacaaattgctacaagattagaaattatgctttaggaatcatgcagctaaaggccccaaggttctacacctccctaactgctcctagggataacatcactaatgtaaaacctaagattggtgctcaagatatttttcaaaccctgaactcaatggatcacctggcaccatccagattaataaactgtctcatctggtcttgtggtcctacccaggaactgactcagtgtaaaaggacagctttgactccctgtgatttcattgctgacctaagcaatcaacactccccactctctggccctctaaccaccaaagtagccttaaaaaccccaatcctggaatattctgggagactgatttgagtaataattaaactctggtctcctgtgcggccagctctatgtgaattaaactctttctccattgctattctcctgtcttgataaatcagctgtattggggcaatgggcagaatgaacccattcagtggttatataagtgcttagttaagatggaaaaggcggccaggtgtggtggctcactcctgtaatcccaacactttgggaggccaaagcgggtggatcacctgaggttaggagttcaagagcagcctggccaacttggtgaaaccctgtctctactaaatatataaaattagctgggcatggtggtggggacccgtaatcccagctactcgggaggctgaggcaggagaatcacctgaatccccggaggcagaggttgcagtgagccgagatcacgccactgcactccagcctgggcaacagagcaagactccatctcaaaaaaaaggttggaaaaggcactaaatttgtgggtggaagaaatgaacagaattatgttccaattaacagctgtcaggttcagtactattcatggttccaggcatccactggaggtcttgcaacatatccttcatggataaggagaaactactgtagtcttttaataaatagtgctggaataattgaatatcccccatatgcaagagaaaaagttggactcctatctcacaccatatgcaaaaattaattcaaaatggatcaaaaacttaaatgaatgagctcaaactataaaacttttagaagaaaacatagacataaatcttcatgaccctgggttaggcaaagacaccacacaagtaacaaaagaaaaaaatacataaattggacttcatcaaaattaaaacttttgaccgggcacagtggctcacgcctgtactcccagcattttgggaggccgagaaggccgatcacaacaaggtcaggagttgaagaccagcctggccaatatggtgaaacccaatctctactaaaaatacaaaaattggtcaggcacagcggctcacacctgtaatcccagcactttgggaggccgaggcgggtggatcacgaggtcaggagattgagaccagcctggccaacatggtgaaaccgcatctctactaaaaataaaaataaaaataaaaattagctgggcgtggcagcgtgcatctgtagtcccagctacttgggaggctgaggcaggagaatcgcttgaacccaggagatggaggttgcagtgagccaacagagcgccactgcactccagcctggcgacagagagagactctgtctcaaacaaacaaattagctgggtttggtggcgcatgcctgtagtcccagctacttgggaggctgaggcaggagaatcgttggaacccaggaaggggaggttgcagtgagccgagatcacgccactgcattccagcctgggcaacagagcaagactccgtctcaaaaaaaataaaataacccatgcagactgactgcccatggaaaaaataagaataacctaccaggatcttcctggtaaaatcaagatgatcagtggatacagttattcgatgtctgacacattcacttaaccaatcaatgaaatttgtatcactacattatcagccacatgaaagacggtgaaactgacgggattttgactcactatatgtagaacaatcccctgatccacaaacctcttaatcctaaatagaagtaatgaaattcaaaaatagaaacagaagtaatttgttatgatcaatcaacccatactcttttttctccttaatactgcatatcatgtttagtcctttataattgaattttcccaagatttaacaattttacatgtctatggttttccaactactttcctttcctctttttggatataaagacatttgtctctctctagtctttatggtttctcaaagacagtggctctgagatcatcagccagttaattcagcaccccgaaatgtaattcatttcagccttaagacttaaattcatttaaaaatgttcactcttaccatcttaggctacagtttccagtttttaacttgctatatactttccagtttgaaaacaattatctctgctgctaataataatctatatatttattttttgtaagagttttacaatttctcaaaaatcctgcaaaacaggttaatataccactatcccattttacagataaggaaactgaagcacagagaaattaaaattatttgcccaaggtaaagagctacaatgaaccaaaatcgattgcactttgggctttttttttttttttttttgagatagagtttcgctctttttgcccaggctggagtgcaatggcgtgatcttggctcactgcaacctctgcctcctgggttcaagcgattctcctgtctcaacctcccgagttgctgggattacaggcatgcaccaccacgctcagctaattttgtatttttagtagagacggggtttctccatgtttgtcaggctgcctcgaactcctgacttcaggtgatctgcccgccttggcctcccaagtgctgggattacacttgtgagcaaccgcgcccggcccaagggctcttttcataaggccatgtggatctttaatacagaacttctcaggattgcacataaaattttctctgctaaaaattgattttttaattagcggttgacaggagttaagaaaggtgtaggggtggaagggaagtgggggtagctataaaaggacatggtagatcctgtggtgatgaaaatatttggtaccttgactgtatcaacatcaataccccagttgtaaaattgtactataattttggaagatattgccattggaggaaatgaggtaaatggtacatcaggtcaatattattatttattttaactctgtataaatctagaattatctcaagataaaaagttccattcaaaataataaacaattggggcctacttgaggatagaaggtggaaggagggtgagagtcaaaaaactacctatcaggggccaggcgcaggggctcgcgcctataatgccagcacttcgggaggctgaggcaggcggatcacctgaggttaagagttcgagaccagcctggccaacatggtgaaaccccatctctaccaaaaatacaaaaattagctgggtgtggtggcggtcacctgtaatcccagctactcaggaggccgaggcaggagaatcgcttgaacccggggggcggaggttgcagtgagccgggatcgcgccactgcactccagcctgggtgacaagagtgaaactctatctcaaaaaactacctatcaggtactatgcttattacctggatgatgaaataatttgtacatcaaacccctgtaacatgcagtttacctatatagcaaacctgcgcatgtaccctggaacctaaaataaaggttacaaataaataataaatgatatttcttttctaaaccaatttcatgtttaagaaccttacttaaagtgaataggaaagtttgggtaaattaaaacaaaacaggatcatgtataggagctctgaaatccaacacagaagtcttctaatgtggggtaagttccatcaataaaagctccaaaacaagtcatgaagatccttgaaaataaaaaaggagctcctgggattcttatttcctagagaaatgaaaccagtcaagacagtgtaggaaacaaaattgttaagtcatggaaagtcacctcaaaaagaagcagtagaataaagttagaaccacctaagctttgctttcctcaataccaccatacactttactgcaatcctcaacttagagaaagactgaatgtgtatgtcaccttcaacctgatactcacacacacatttcaaaagcttccccaaaaatgccttttttttttttcctttttgctactcaccaagtgcctgaagtgtcaatcatttcctgcttctcccagctgcaggacttggaactaggaaaacattcagtcagcgtctagagcaggtctggttagaaggatgagctcatccctttcagatgcacacctgatcctcaagaagctgcccctcctccagcaagcagatctttgtatgtttaaagtgacacccacaacctgtacaaccactttgccagagccaaagtaagtctttccttatacatgcctagtgccatggaatcatttcctggtctagccacctcacacagccactgaacgcaggtggcagtggcaacagctgctgctgctgctactatggctttgttagagaaggacttcattttcagctacaacggaggtcaagtccttcaccactgccctggaaacactgcactgtttgtttcaacagccccttgcccacagtcagatcttaccagaatcatgccttctttcaaaactcacaaccatttttctgaaccaacaatgtagcacctcaacatctgccttattccatttgccctgtctaaaagttaaattagccaaggcagctaaatgtactgtatgtatttagagctaaaatgttcccaactcaggtttgccctcagttttactacctctaagaaaacctttattctgccatagcagtctatttattggtaaagtatacagtaatcctaatacagagatatgtaaacttcacttcatgaaaaaatagtataatagccgggcacggtggctcatgcctgtaatcccagcactttgggaggccgaggtgggcagatcacgaggtcaggagatcaagaccattctggctaacactgtgaaaccccatctctactaaaattataaaaaaattagccgggcgtggtggcgggcatctgtagtcccagctactcaggaggctgaggcaggagaatggcgtgaacccaggaggcagagcttgcagtaagctgagatcatgctactgcactccagcctgggtaacagagcaagactctgattcaaaaaaaaaaaatagtataatagtggccaggcactgtggctcatgcctataatcccagaactttgggaggccaaggcgggtggatcacctgaggtcaggagttcaaggccagcctgaccaaggtgaaaacctgtctctaataaaaatacaaaaattagccaggcgtggtggtgtgcgcctgtagtcccagctacttgggagactgagacaggagaactgcttgaactcaggaggtggaggttgcagtgagctgagatcgcaccactgcactccagcctgggcgacagagcaagactctgtctcaaaaaaaaaaaaaaaaaaaaaaaaatagtataatagtggtacaaaatatcttcaatcagaagtacatgggttccaaatagttattcaacaaacatttctatacacctattatgtgcaagtatctctgatagggtgctgaactgggcttttgaaaacagcatcacaaaaatctaagaaagaactcatcccaccctaattagccttccccaggacctttgcagtatttttacttcagtcatcacaagcttctaatacgctaacaggctgtctaaggagtataaactatgtcagagaaaaatcaaattcattagtggttacctttggtgagggacttgtaatcaataaggggaaactcgggagcaaaccaatttactaatatttaatttgctggatggcgattataaagatgtttactgtgttattcttttaaatgtcttagaaaatatataataaaatttttaaaaaacagaactgtgaatcaaaggaaaagagaaaggacaacccatgagatgggagaaaatatttgtaaatcattattctgataaggggctaatatccacaatatataaagacctcctgccatgtgcagtggctcacatctgtaatgccagcactttgggtggccaaggcgggcagatcatttgaggccaggagtttgagaccagcttggccaacatggcgaaaccccatctctactaaacctgtctctattaagccctgtctctactaaaaatgcaaaaaagttaatcaggcgtggtggcgcacacctgtaatgccagctgcttgggaagctgaggcaggagaagcactttaacccgggaggcagaggtggcagtgagccgagatcacaccactcaactccagcctgggtgacagagtgagaccctgtctcaaaaacaaaaacaacaaaaaaaaaaactacaagtcaacaacaacaaaatacaattaaaaaataaagaacttgaacagacatttctccaaagaagatacaccaatggccaatgaacacaggaaaagacactcaagttcactaatcattagggaaaataaatcaaaaccacagtgagatatcacctcacacttattaggatggctactattaaaaaaaaaggtggccaggcacagtggctcacacctgtaatcccagcactttggaaggacgaagggggcagatcatgaggtcaggagttcgagaccagcctggccaatgtggtgaaaccctgtctgtactaaaaatacaaaaattagccgtgtgtggtggtgcacacctgtagtcccagctactcaggaggctgaggcaggagaatcgcttgaacccaggaggcagaggttgcagtgagccgagatcgcaccactgactccagcctgggcgacagagcgagagtccatctcaaaaaaacaaaacaaaaccacacacaaaacaaaaaaaacagtgttggcaagaacgtggagaaattggtatccttgtgcacattggtaagaatgtcaaatggtatagccagtatgaaaattagtatgatagttcttcaaaattaaaataaaatgacatatgatccagcaattctacttttggttacatatccaaaagaactgaaagtatgctctcaaagagataacttgccaggcacattggctcacacacgtaatcccagtattttgggaggctgaggcaggattgcttgatctcatgagtttgagacaaggctgggcaacatagtgagactccatctccacaaattttttttttttttttgagacagagtctcgcattgttgccgaggctggagtgcagtggtgcaatcttggctcactgcaagctccgcctccctgattcacgccattctcctgcctcagcctcccaagcagctggtgtgtccagagttggttccttccagtgggttcttggtctcgctgacttcaagaacgaagccgcagatcttcacgatgagtgttacagctcttaaaggtggcacagacccaaagagtgagcagcagcaagatttattttgaagagcaaaagaacaaagcttccacagtgtggaaggtgacccaagcgggttgccgctgctagctggggtggacagcttttattcccatatttgtccccacccacgtcctgctgatcggtccattttacagagtactgattggtccatttttacagagtgctgaatgatgcatttacaatcctttagctagacacggagtgctgattggtgcatttacaatcctttagctagacacagagcactgattgctgtgtttacaatcctctagctagacagaaaagttctccaagtccccactcgacccaggaggtccagctggcttcacctctcactgggactacaggcccccgccaccatgcctggctaattttttgtatttttagtagagacggggttttaccatgttaggcaggatggtctccatctcctgacctcatgatccgcccaccttggcctcccaaagtgctgggattacaggtgtgagccactgcacctagccaattttttttttaattagttggatgtggtggtgtgtgcctgtagtctcagctacttgggaagctgaggtgaaaggatcacttgagcccagaatatcgatactgcagtgagccatgattgtgccactgcattccagcctgggcaacagagcaagactctgtctcaaaaaataaataaagagataattgtatacccatgttcatagcaacattattgacaatagacaacaggtaggagccacctaagagaacaggtaagcaaaatgtggtacatacatagaactgattcagccttaaaaaggaaggaaaatctgatacatgctacaacacagatgaacttgaggacattatactacgtgaaataagccagtcacaacaggacaaataccaatgactccattatatgaggcatgaagaatagtcaaattcattgaaacagaaagttggatggtggtggctaggcactttggggaaggaggaatcggggggtgtttaatggatttggagtctcagttttatgagatgaaacagggtgggcaggtgtggtagcgcacacctgtaatcccagcacttgtggaggccaaggcgggtggatcacccaatgtcaggagttcaagaccagcctggccaacatggtgaaaccctgtctttactaaaaatacaaaaattagccaggcgtggtggtacagtcctgtaatcccagccactcgggaggctgaagtaggagaatcacttgaacccaggaggcagaggttgcagtgagctgagatcaccccactgcactccagcctgggcgacagagtgaggctgtctcaaaaaaaaaaaaaaaaaaaaaaaaaaaatgagagtgctgaagattggctgcacaacaatgtgaatgtatgcaacactactgaactgtacacttaaaatggttaagatgataaatattatgtgtattttaccacaattttttaaaaaataaagagaactaatcaaaacacaaagtggggtgtgatgctgctcacctgtagtcccagccaatcaggaggctgaggtgggaaggaattacttgagcctaggagttcgagtacagcctgggcaacacaggagagcccatctcttagcctgatcagtataagatgttgagagagaaacactctaaattcaaattcaaataaacaatctgctgcttttctcatttcaaaaaacaattcaagccttactagtgatatttgttgaaaaggactaataggcgccgggcgcagtggctcacgcctgtaatcccagcactttgggaggccgaggtgggcagatcacaaggtcaggagatcgagaccatcctggctaacacggtgaaaccctgtctctactaaaaatacaaaaaaattagccaggtgtggtggcgggcacctgcagtctcagctacttgggaggctgaggcaggagaatggtgtgaacctgggaggtggaggttgcagtgagccaagatcgtgccactgcactccagcctgggtgacagagcgagacaatatctcaaaaaaaaaaaaaaaaaaagaaatggaccaataggcatcaaattcattactcccaactacctaactgaacagtttcatacaactgaaaaacctaatatgttcagggcagctaatatatttctagaggcaggaattagaaagtaaatattgaccaggcacagaggctcatgcctgtaatcccagcactttgggaggccaaggtaggaggatagcttgagcccaggagtttgagaccagcctgggcaacatggtgaaaccccatcactacaaaaaatacaaaaattagccaggtgtggtggcatgcacctgtagtcccaactactcaggaggatcacttgagtccaggaggtggaggctgcagtgagccataatcctgccattgcactccatcttgcaggacagtgagacctggtttccacaaaatcattcctagagtttgcttaaaaaaaaaaaaaaaagaaaaaaaaaaataaacagaaagaagacttagcctaaagaacatagtctccaaatacaaaggatggtagcttagaaataaaagtctttaattatttgtcatattctatacaaagtttgaagtctgcattaagttattaagagccccattcctgaggcttattattcaaaagggtggaaatacgaaaactttaattttaaaaactaagaagtaggccgggtacggtggctcgcgcctgtaatcccaacattttgggagccggaggaggatggagagcctgagctcaggagttcaagatcaccctgaccaacatggtaaaaccctgtatctactaaaaacgcaaaaaatttcccagggatggtggcatgcactgtaattccagctgcttgagaggctgagacacgagaattgcttgaacccgggaagcggaggttgcagtaagccaagatcacgccactgcaccccagcctgggagacagagcaagactccgtctcaaaaaaaaaaaaaaaaagaaaactaagaagtaatccttcagaggaagaaatgtgcttaattgagtagtaaggattaaatgagttgcagtgtgcgaagtgttaagcctagctcctgccacacgatattactcaacaagttattcagatttggccgggcacggtggctcatgcctataatcccagcaatttgggaggccaaggcgggtggatcacgaagtcaggagtccaagaccagcctgggcaatatggtgaaaccctgtccctaacaaaaatacaaaaattagccgggcatggtagcgcgtgcctgtggtcccagctacttcaggggatgagacaaaagaattgcttgaacccgggaggcggaggttgcagtgagccgagttcatgacaccgcactccagcctgggcaacagagcgagattccatctcaaaaacaaaaaaaacaaaaaaaaacagttattcagactttctctattgtctcatttccctacgtttccctcttataccaacataaccaaaatgagtttgactgtttttaacacaaacatgaacaatatttgaaataactgtatacatttacgagtaattttacaatcactatcttttaaaacttaaatcagctcaaggaagggaaaaagaaaactgaaatttagagtccctataacattatggctactgtgctaagaactgacatctatcacttcatttaatttgctcaggtaggttattattatcctaatctcacagataagggaagtgaggttcaaaaacatttaataatttggccaggcttggtggctcatgcctgtaattccaacattttggaaggccgaggtgggcagatcatttgagcccaggagttcgagaccagcctagccaacatgatgaaacccagtctctactaaaaatataaaaaattagcagggcatgctagcgcgtgtctgtagtcccagctacacaggaggctgaggtggaaggatcacttgaacctgggaggtggaggttgcagtgagccaagatcccaagatcacagcactgcactccagccagggggacagagtgagactttgtctcaaaaaataagtaaaatttatatggaaaggcataggccctaggaatatgtattatagatatcagtaagtactccaaaacactgaggtgtctaaagcttaatttggtaattacaaagtttcttatatcaagctgtaaaataagcttgatgtttccttagacctagtgggcatcaggaaaggtgaaaacccaatattaaaatgatattgcgtctccctggtgttcccctaacactgaaggaacacatagaattcccatttgttcctaaatacccttctgatcttcaatgaccatgagtaaagataaacaaggagttgaaagaaatggcaaaaaagaaccaaagaactatcttgttttggcactatacagctctgactggggtcaacatccaagacaggatgtaccatcaaaggaaatggatctgcacagagaaataaaagctcagcccgggtcagaaatgaaacaatggcacacaaataagttttgtttccacagagaatacatttttctatataaactttaccatgaggctgggtgctgtggctctcgcctgtaatcccagcactttgggaggccgaggtgggcgaatcacttgaggtcaggagttcaagaccaacctggccaacatggtgaaaccctgtctttacttaaaatacaaaaattgccgggcatggtggctcctgcctgtaatcccagcactttgggaggcagaggtgggcggctcatgaagtcaggagatcgagaccatgctggccaacatggtgaaaccccatctctactaaaaatacaaaaattagctgggcatggtggcaggcacctataatcccagctactcaggaggctgaggaaggagaagcgcttgagcctgggaagcggaggttgcagtgagccaagatcatgccactgcactccagcctggctacagagcgagattccgtcacaaaaaaaaaaaaaaaaaattagctgggtgtggtggcgtgcgcctgtaatcccagctactcaggaggctgaggcaggagaactgcttaaacctgggaggcggaggttgcagtgagccaaaatcacgccactgcactccagccttggtgatagagcaagactctgtctccaaaaaaaaaaaaaaaaaattagccaagtgtggtggcacatgcccgtaatcccagctacttgggaggctgaggcatgagaatcacttgaacctgggaggcggaggctgcagtgagctgagatcacaccactgcactccagcctgggtgacagaacaaggctctgcctcaaattaaaaaaataaaaataaaaaaactttactgtgaaactacattatctacaagatgtttcttcagaaatttcttctcaggagaaacttagaaatttttcttccaagacttaataattgtcactgacttcctgccagctttatatcagaaacttttggccaggcacagcggctcacacctgtactgtaatcccagcattttgggaggccaaggtgggcggatcactcgaggtcaggagtttgagaccagcctggccaacatggtgaaaccccaactctactaaaattacaaaaattagccggacatggtggcacacacacctgtagtcccagctatctgggaggctgaagtgggagaatcgcttgaacccaggaggcagaggttgcagtgagccgagttcgcaccactgcactgcagcctggaccactgagcaagaactgacatctatcacttttctgagacagttctgtctcaggaaaaagaaaaaaaaaagaaagaaacttttcaaacatcctagaaaaaatgaacctacacacaggtcacaataaaacaaaaatgtattttgcaagaatacaatatagccttacctcagcttctgttttcatttaaaaactcaaatgctatttgaaaaaaatgtgctttgtagaacatgtttcttgctttcaacatggcacgggaaggtaatgctaccacacagtgccaaaacactaaaatatggctttcagaaaagcttgttagtttcataccaacaataatagggctagatttcctatttgcaacaagctatgtaatgaatataacagcttttccttaaaagtcacttatctatagagaatatttatacagacaaactgaaataagaaaaattctagaaaagcaacagtgagttttttaaaaaacatttttgtacattctaccatcatacctccttaatatacaaatattcatatatgtgcctgatataagccataaaaataaaataattcacaaatttattatatgaaagtatccctgaaactaaaataagtaaaatttggataagcttttctaccaatatactctctgggagaaaaagacagaaaagtgagccttaaagtgaattccatttttctactacttctcattaaatattaaaaatgtgtccatattttttaatattgataaactaaattaaaaaccttagtgaagtacaaggtatggtagctcctatctataagctcagctacttggaaggctaaggtgggaggatggcttgagtgaaggagttccaggccagcctgggcaacatagtgagaacccagatctagaaaaaataaataaataaaaaataggctgggcgcagtagctcacacctgtaatcccagcactttgggaggccaaggcaggtgcatcccttgacatcaggagttcgagaccagcctggtcgacatggtgaaaccccgtctctactaaaaaaaaaaaaaaaaaaattagttgggcatggtggcaggcacctataatcccagctactcaggaggctgaggcaggagaatcgcttgaacctgggaggcggaggttgcagtgagtagagatcacgccactgcactccgtctgggcaacagagcgggactccatctcaaaaaaatagtaataaaaatgaaataaaataggccaggtgcagtggctcacacctgtaaatcccagcaatttgggagacgaggcaggcagatcacttgacctcatgagttccagaccaggctgcacaacacagtgacaactcatctctacgaaaaatacaaaaaaactagccaggcacggtggtatgcccctatagtcccagctactcgggaggctgaggcaggaggatcacctgagcccagggaggttgaagctgcagtgagttgagatcccgccactgcactcccacctgggaaagagttcgaccctgtctcaaaaataaaataaaatagatagacagaaaacctaatttatcctatatgtataattaaatatcagatagttattatttacatatactattgaggatttttaatctgatcaattttattgagctagcttctccccaattttaaatgcaacccctctaactcagatggcacataactgtaaaaaacattaaatgaataccagaattttatagtcaaatcacatttgtacccaaaagtaggctttttcccccttgttttaattcataaatttattcaacagacttgattttacaaattccagccatcctagaattttcctcatgtcaagatattacaagcattataacagcctattctagtgttttactcactgatggtcaagagatttcccctaaaagtaaacagcaaactagaaaaaacattgccagctatatgataaagaatatacttgatggccgggtgaggtggctcatggctgtaatcccagcacttagggaggccaaggctggcacatcacctgagatcaggagatcaagactagcctggccaacatagcaaaacccagtctctactaaaaatgcaaaaataagctgagcgtggtggtgcatgcctgtaccccacttactcaggaagctgacgcaggaaaatccttgaacccacgaggtggaggttgcaatgagcagagatcttgccaaagcactccagcctgggagacagagtgagacattgtctcaaaaaaaaaaaaaaaaaaaaaaaagaatatatttggctgggcgtggtggcacacacctgttatctcagcactttgggagaccaagatagcagaatcacttgagctcaagagtttgagaccagccttggcaacatggtgaggccccgtctctccaagaaacacaaaaaattagccaagcatggtggtgcgtgcctctggtcccagctactcaggaggctgaggtgggaggattgcttaagcccaggaggtcaaggctgtagtgagtggtgaccgtgctactgcattccagcctctttttttttttttttttttggagatggagtctcactctgttacgtaggctggggtacagtggcgtgatcttggctcactgcaacctccacctcccgggttcaagcaatcctgcctcagcatccggagtagctgggactacaggtgcatgccaccatgcccagctaatttttgtatttttagtcaagatggggtttcaccatgttggccaggctggtctcgaactccggacctcaggtgatccacctgcctcggcctccccctcccaaagtgctggggttacaggcgtgagccaccgcacccggcctaccaccatttttttttttgagaccctgtcacccccaccaaaaaaaagaatatttttactataaagagattcaaaacgtcaaaataagaaaaaaattgcatatgccaaaacagagataggcaaagacgtgaacagttagaaatatgactatcttgaaaacccaaaagggctgggcgtggtggctcacaccaaaactttgggaggctgaggcaggccgaccacctgaggccaggagtttaagaccaccctggtcaacatggtgaaaccccgtctctactaaaaatacaaaaaattagctgggcgtggtggcgcgtgcctgtaatcccagctactcagaaggctgagagggaagaatcacttgaacccagaaggcggaggttacagttgagccgagattgtgccactgcactccagcctaggtgacagagcaagactctgtcttgaaaagaaaaaaaaaaaacacagaagaaaaaattatagttagcaaaaggatttagtggctcacacctgtaatcctagcactttggaaggccgaggaggacaggtcacttgaggccaggagttcgagaccagctaggccatggagaaacctcatctctactaaaaatacaaaaattagtcacacgtggtgccatacacatgtagttacagctactggggaggctaaagtggaaggatcatttgagcccgggaggtcaaagctgcagtgacccagtatcgcaccactgcactccagcctgggtgatacctgtctcaaaaaacaaacaaaaaaactgtatggtactggcccaagaataaacaactgaaaagaacagaaatattcaaaaataaacacatgcaggctaggcgcaatagctggtacctgtaatcccagcactttgggaggccaaggcggatggatcacttgaggtcaggagttcgagaccagcatggccaacatagtgaaaccccgtctctactaaaattacagtaaattagccaggcgtagtggtatgcacctgtagtcccagctactccagaggttgaggcagagaatcgcttgaaccccagtggcggatgttgcagtgagccgagatcacgccacggcactccagcctaggcaacaaaagtgagactccgtctccaaaaaaaaaaaaaaaaaaaaaggaaacacaggcgtacatacatacatacacaaatggtggatatatggcaattgagaacatgatgaagataagatttcatatcattaaagacacgatattcaacaaataggcttgggtcagttgcatatttgtggagaaaaagagtacctccaaaaacatataaagataaattccaaatcagttaaagagttaaataagctagtaaagagttaggataaatataaaatatttttataattttgggatggagagagcctacttaagcaagcctcaaaacccagaaaccattaagaaaaaagacagatatgaaattttagcacatcaacggacactacagatgatgcaacagattgtagaaaatatgtgcaatatatgtttaaaatacagggatacacagagagagttcctattagtctaaagagaaaagtggggagaggtgtggatagttaatgggtacaaaaacaaatagaaaggctgggcgtggtggctcacatctgtggtggctcacatctgtaatcccgtcactttaggaggccaaggcagcagatcagttgaggccaggactttaaaactagcctggccaatatggtgaaaccctgtctctactaaaaaatacaaaaattagccaggcatggtggcatccacctgtaatcccaactgagtatactcaggaggctgagggacaagaatcgcttgaacccgggaggcagaagttgcagtgagccgagatcacaccactgcactccagcctgggcaacagagcgagactcttgtctcaaaaacaaaaacaaaaacaaaaatagaaagaatgagtaagagggaatatttgatagcacaaatggataattacagtcaataatttaattgtacatttttaaataactacaagtataattgtttataacacaaataatgaatgctgagaggatgaattccccattttacatgatttgattattatgcaatgcatgcccatatcaaaacatctcatgtacccaataaatatacacacctactatgtatccacaaaaaaataaaatatttttttaaaaataaagctgggcatagtggctcacacctgtaatcccagcactctgcgaagctgaggcaggcagatcgcttgaggtcaggaattctagaatagcctgggcaacatagcaaaaccctttttctataaaaaatacaaaaattagctggtcatgatggctcacactgtggtcccagctactcgggaggttgaggtgggacgatcacctgagcttgggaaattgaggctgtagtgagcgaaatcactccagcctgggcaacgaagagatcagtctcaaaaaaaaaaaaaaaaaaaggcccagcacagtggctcacacctgtaatcccagcactttgggaggccaaggtgagaggattacttgaggccaggagttcaagaccagcctggccaacatggcaaaactcgtctctactaaaaatacagaaattacttaagccaggcaaggtggctcacgcctgtaatctttgggaggccgaggtgggcagatcacttgagatcaggagttcaagactagcctggcgaacatggtgaaaccctgtctcttctaaaaatacaaaattagccagggatggtggcaagtgcctgtaatgctagctacttgggaggctgaggcaggagaactgcttgagcccaggaggcagaggctgcagtgagccgagattgcgccactgcactccagcctaggcgacagcaagactccatctcaaaaaaaaaaaaaaaaaaaaaaaaaaatcaagttccattcatgtatcctcagcaaactaacacaggaacagaaaaccaaatgccacgttttcacttataagtggcagctgaacaatgaaaacacatggacacagggaggggaacaacacacactagggcctgtgcgggggtgggaagagcatcaggataaacagctaatgtatgcagggcttaatacctaggtgatgagttaataggtacagcaaaccaccatggcacacatttatgtaacacgcctgcacatcctgcatgtgtatccaggaacttaaaattaaattaaattctaaaaaaaatacaaaaattatctgggcgtggtggcaggtgcctgtaatcttgcctcctcaggaggctgaggcacaagaaccatttaaacctgggaggtggagactacagtgagctgagctcacaccactgcacttcaaccttaacaacagagagagactctgtctcaaaaacaaaacaaaacaaaacaaaacttaaaaaaatgttttcagagaataaatgtagctttgatacaaaagaaaaactaaaatgggatgggaggggtagaatgagaagaaaaaagcccagttacaaaataagcaaagaataagcaattccactgaaagaaatacagccaataaagaaataaaaagatgttaggctgggcacagtggctcacacctgtaatcccagcactttgggaggccaaggcgggcagatcacctaaggtcgggagttcgagaccagcctgaccaacacggagaaacccgtctctactaaaaatacaaaattagctgggcatggtggcacatgcctgtaatcccagctactcaggtggctgaggcaggagaatcgcttgaaaccaggaggtggaggttgcggtgagctgagatcgcaccattgcactgcagcctgggcaacaagagcgaaaccctgtctcaaaaaaaaaaaattagccaggcggtggcgcatgcctgtaatcccagttacgtgggaggctgaggtgggagaatcacttgaacccaggaggcggaggttgcagtgggctgagatcatgccattgcactccagcctgggcaacagagagagactctgtctaaaaataataataataaaaataaaaaataataataaatatggaaaatattcaacttcatctcaaataaatggaaatttaaaatgagatcacttggccaggtgcagtggctcatacgtgtaatcccagcactttggagggctgaggtggaaaaattccttgagttcaggagttcaagatcagcctgggcaatatagtgagacctcatctcttcaaaaaaattaaaaattagactttctcttcctggttcctagcagagtcaggaaaagctttgttgagagggcggggtgaaaaaaacttttttaaaattagctgggcatggtggtgcacatctgtagttccagctacttgggaggctgaggtgagaggattgtttgagtccaggaggcaaaagctgcagtaagccgtgattgcactgcactccagcctaggcaacaaagaccctgtcttaagaaataaaaataaaaataaaaataaaaataaggcagtggttcacacctgtaatctcagcattctgggagtgcaaggttgacggatcatctgaggtcaggagttcgagaccagcctggccgacatggtgaaaccccatctctactaaaaatacaaaaattagccgagcttggtggcaggtgcctgtaatcccagctactcgagaggctgaggcaggaaaattgcttgaacccgggaggcggaggttgcagtgaaccgagattgcgccactgcactccagcctgggtgacacagcaagactccatctcaaaacattaataaataaaaataaataaaatgagatcacttgtcttctctttttagcagcagggtctcactctcactctgacgtgtagtcagactgaggctggagtgtagtggcatgatttagctgactgcaacctcaaacacctgggctcaagggatcttcctgcctcagcctcccaagtagccaggactataggcgcatgctgccagacccagctaattttttaaaatttttggtaaaaaattagctggggccgggcacaggggctcacgcctgtaatcccagcactttgggaggatgaggcggggtggatcacctaaggtcaggagttcaagaccagcctggccaacatggtgaaaccccctctctactaaaagtacaaaaattagctgggcatggggctcacgcctgcaatcccaactacttgggaggctgaggaaggagaatcgcttgacccaggaggcagaggttgcagtgagctgcgattgcgccactgcactccagcctgggtcacagagcgagactccatctcaaaaaaaaaaaaaaaaaaaaattagccgggcgtggtagctggtgcctgtaatctcagctactcaggaggctgaggcaggagaattgcttgaacctgggagcacaggttgcagtgaactgagattatgccactgcactctagcctgggcaacagagcgagactccatctcaaaaaaaatttttttggtagaggccaggcaggtggcttacacctgtaatccctgcactttgggagaccgaggcaggcagatcacctgaggtcaggagttcgagaccagcctagccaacgtggtgaaaccctgtctctactaaaaatacaaaaattagctaagtatggtggggcgtgcctgtagtcccagctactcgggaggctgaagcatgggaatcacttgaacccaggaggtgaaggttgcattccagcctgggcgatggagcaagacttgtctcaaaaaaagcaaaacaaaacaaacaacaaaactgcatgtatttcttttttcttttttttgagacagagtgtctgttagttactcagcctggagcgcagtagtggaatcatggctcactacagcctcaacttcccaggctcaagtgatcctcttgcctcagcctcctacgtagctggggttacaggtgcatgccaccaaatcctggctaaatttttcacttttttttgtagagacagggtttctacattttgccatacccaggatggtcttgaacttgtgggctcaagcaatccacccaccttgagccttccactctagcctgggcgacagagcgagactccatctcaaaaaaaaaaaaaaagaaagaaaaaagaaagttctctagggagaactgctgggattataggcgtgagccaccacacccagcctaatatgtattataacgcagttgtattcctccacttttttctaaatcagagaagcgtttattaaatggcccagcagtgcaactgaagacaaaaaaattaaacagtaatatagcaaaccaaaaataggaagcacctaaataaaacacctgaattacttatccttagtacaagtaggaagtataagtacagtttaaggtaaacaagtaatcagtttgtattctgtcatctatcagtaaatagcctcttgacaaaactggtttcccaaaattagctgagggcatctataactctacagtaattattaaatataacttggcaatgtggtagagtacaaggaacagttaactggaaaccaggacatctgggacattgcagctgtgtgactttgggtaagtcatttaaaagttctctaggcttgccgggcacagtgggtcacacctgtaatcccagcactttgggaggccaaggtgggcagatcacttgaggtcaggagttccagacgagcctgaccaatatggtgaaactctgtctctactgaaaatacaataattagctgggcgtggtggcgggcgcctgtagtcccagctactcaggaggctgagacaggagaattgcttgaacctgggaggcggaggttgtagtgagccgagattgtgccactgcactctagcctgggcgacagagcgagactccatctcaaaaaaaaaaaagaaagaaagaaaaaagaaagttctctaggctttagtttcctcaatataaaatgaatagaatggactggttgaccgctaagcattctagtaagtctagaactgattatcaatacttcattaatggtatttatcattctcacttaggtttctggggattctttttttttttttttttctcagtagaaatagggtctcactctgttggccaggctggtcttgaactcctggcctcaagcaatcctcctgccttagcctcccaaagtgctgggattacagacataatctcacgtagatttttaaagaagccatttacaaagatataaaatttgggggccgggagtggtggctcacgcctgtaatcccagcactttgggaggccaaagcgggtcaatcatctgaggtcaggacttcaagaccagcctgcccaacatggtgaaaccctgtctctaccaaaaatacaaaaaattatctgggtgtggtggcgggcacctgtaatcccagctactccggaggctgaggccaagagcaaaactctgtctcaaacaaacaggtcggatgcggtggctcaccactgtaatcccagcactttgggaggctgaggcgggtggatcgcccaaggtcaggagttggagaccaccctggccaacatggcgaaaccccgtctctactaaaaatacaaaaattagctgagctcggtggcacgtgcctgtaatcccagctactcaggaggctgaggcaggagaatcgcttgaacctggtaagcagaggttgcaatgagccaagattgtgccactgcactccggcctgggtgacagagcaagactctgtctcaaaaaacaaacaaataatacaaagatgtaaaatttgaatttcaaccagaaaaccgtactttggactttggaatatagagtgaaaaaaaaaacctgaaagcaaatatataaaaacatgtgacacatacatacatttttctcaatataaaaaaactacagtatgaaggcggggcacagtggctcacgcctgtaatcccagcacgttgggaggccgagacgggaagatcacaaggtcaggagatcaagaccatcctggctaatataatgaaaccctgtctctactaaaaatacaaaaaatagccgggcatggtggcgggcacctgtaatcccagctactcaggaggctgaggcagaagaatggcatgaacccaggaggcggagcttgcagtgagccaagattgcgccactgtactccagcctgggcgacacagggacactccgtctcaaaaaaaaaaaaaaaaaaaactactgtatgaaaatatgtttgactaaatgccttaaagtctgttgtaataacatttcccctatatatgaatacagataaccatttccactactaaaatgatcacttgctggaagcttacaaatatataattgcttgctacaactattttcccaagcatagctccctatacaattatacacagcagaaatttggtaatttactcaattctctatataacaatacaaattttgtatttagcaccatgctaacattcacattagttccccataggtagtgtaaatatctgagggagaaaatgtatgagtaaaaaaacagatacccctatccatttataccttccaagtcccacccagaattctggtgtcctggccagttccacctgcaacctctccccacttcctccataccaagactccctccttccctacaaaagaaagaaatctttcttagtatattagaatcacataaatttcccacaccaatctctattctaccatctactagctcaataatctttggtaacttcctgaactttttaagccttggttttctttaaagtaactagtaccagctgcagagcagagtgttgttataagataaaatgagataatgtgcctggcacattaataatcactcaatgaatgttatctattattattattgccttaagactgttgtaatatttatttatttatttatttatttatttatttatttattttgagacagaatcttgcctgttgcctaggttggagtatagtggcatgatttcggttcactgtaacctccgcttcctgggttcaagcgattctcctgcctcagcctcccgagtggctggaattactggcaggcatcaccatgcccagctaatttttgtatttttagtagagatggggtttcaccatgttggccaggctgatctcaaactcctgacctcaactgatccgcccacctcagcctcccaaagtgctgtgatgacaggcctgagctaccgtgcctggtccgtatttatttacatctacagtaaaggagtactaaaaaagactaataggaccagcgaggtggctcacgcctataatcccagcattttgggaggctgaggtgggaggatcacttgagcccaggtgcttgagatcagcatgggcaacatagggagatcctgtctctagaaaaagtacaaaaattagccaagcacctgtagtcccagctcctggagaggctgaaaagcaagaggattccttaaacccaggagactgaggctgcagtgagccgtgattactccactgcactccagcctgggcaacagacaactcgtctttaaagaaaaaaaaaaaaaagggcttaaattatgaactgaccagtgaattttctcctcaaacttccattcttttatctcttctgagaaacttactatgtgtttcactaaggcagcacagtttagtttggttaacactttgtaattttgaaaactcttaggctgggcatggtggctcaagcctgtaatcccagcgctttgggaagccaagctgccaaggcaggaggattgctgggtaacatagccagaccagcttaggcaacatagcaagacctcgtctctacaaaaaaaattttaataattaactgcgcgtggttgcatgcacctgtggtcctatctactcaggaggctgaggtgggaggaaagcttgggcccaggaggttgaggtggcagtgagctgtgatgacaccactgcattccagcctgggcaacagagcaaaaccctgtctcaaaaaaagagaaaagaaaattcttactttgggaggctgaggcaggagtatcacttgagcccaggagtttgagaccagcctggcaacatagcaagaccccatctctaaaaataaatcagctgggcatggtggccctcacctgtagtctcagctctgttcaggagacagaggtacaaggatggctggagcccaggaggttgaagttgcagtgagccatgatcttgccactgcactccagcctaagtaacacagtgagaccctgttgcaaaacaaacaaacaaacaaattctttgtcctgtcaactactatataaactcttcaggggcagaaccttgtctcatactttcatgttcatatattgtgcttattacattgtaagtatttttttctctatcagtctgccctcacagggtctgagcaattccaaggcaaagatcgagttctacctgtatttgtatcctgaaggcttagcaatcagacacaaaataggtctcaataaatattaagtggctaaatgaattaatcttttttcactgcaatgccttacacagtactttacacataacaggagttcagtagagcttgttattggattcatgcagaaatcttttggactcaaccaccacacaaagctttatcttgcatcagaaaagcacttctactttaatgtttagctgctgacattacaaattaggttttactctaacatatatcaaataaatgggttcagtgactaaccacattaagaccagctgaagaaggatttttaaaagccatatatatatatatatatatatatatatatatatatgtatttttttttttttttttgagacggagtctcgctctgtcgcccagactggagtgcaatggtgcgatctcggcttactgcaaccttcccctccggggttcaagcgattctcctgcctcagctttccgagtagctgggattgcaggcgcgcgccaccaggcccggctaatttttatatttttttagtagagacggggggggggggtttcaccatgttagccaggctggtctcgaactcctcacctcaagcagtctgcccgcctcggtctcccaaagtgctggaattacaggcgtgagtcaccgcgcccagccaaaaagccattattctaattaatgcatttgtgaacctcaacataaaaaaatccagttatataatcacaagagagttatccctttcaaatgtatacctacaaaagatagaaaaatgatcagaaaacttgtatctgtcgattgaaataaattatttttatgcctgacttgaagccattgttttcactacaaataacagttaaccagcaaagtggtccacacctgtttccagaaaacagtccttaagactcaaagactagatgttttcccctctgtgatttttaactcctgagagacatcttttatttcaacattgagacattcaaaacatgttctgtctcctaaaataaaatctcattcatttcttaaaaggcaaatagcttgataagcacactttaggaacaccaggttttacatccaaataactaaaactatccctagatttagtgttcagcctgctgctgcaattaaaaaaaaattgttttttaagttacatttgcggaaggtttaagtgtcgtattgcacattttttcaccataccatctaacctgactaccttccaggtatttcataagcacaccgtaaagaaattgtacacttgaatgagtctgggaagaaacgtaagcttagcacacacccccttcttccaactcaatacgcttcagaggaagcaaccttagtgtttttttcttctcaagaatcgctctctcccgcccccctaccctgcgctttattttagagtagcaatcattcattatcctactcgtagtttctcagcgaaaagaaccttcccaactaatactagttcaccaggactctccgttcgcatctcaagagtgtccgtggggtatctctccggaaagagggaaaggaggcggcgacgatctgggacgccaccattcccgccacggccatttaggacccaggtcccggcgcgcggtccccgactagcctcaggcagagccgggggatctgtaaaggtctgatcccttctcctccctccacccctctaaccagtgaaaagcaaactgggcccagcgtctgtgctctcattcaacataccctcctcgtcgctgtaccccatttcttcccacttctttcccaatgtagcctggtccctttatccagttccgagtctccgtaaacaccctgctcccaacacacacacccctccacgctccagcccgcgccccctgaaccccattacacccgggtccctccccctggacctcccagcagctctagtcctccccgcgtgccctagagcagaccggcgccgcgtccctgtacccacaggacccaggtcctgccccacacgtcacactcaggtccattcctcccgcgacctaaccttccccgcaccccctccccaggcgctaccccctgcaccccgttacccccggccccgcccccctgagggtgtcgcactcacagctcctggcgccgcatacttaaccgccgcggctgctatagctacagggagccaaggcaaccagctctcgcgacactttccttggccatggcgagagcacacgagaagagactctcgcaagaaagtaaatgagtcaggctggaaacagcgaagtatatctcgcgatagcactgtttaaaatggcggcttcaaggcgtttcacgggtgtcccggacaggcgtggaggtggggcgcaggcgaggatgaagcttgagttggccaggagtcggaaaacgattgcaggcgggaccgcgtccgtcggggctgaggaaacttagcgtggcagaccctaaactgggataactttagggatatggccttcttttcccagttgcctcaaacttagagcagcgtcgtctttagccgaagattcattttcccagcattttccttctccaggcggagtagttggagacagagggcaagccagaaactgaccttcccatctcctcattcccttccatcaagaacttttcatcgttctttccccaccctggtttgtaaatggtatttggcttcataaaaacgtttgtccacaggtgccctgctccatcagttcgctccagcaatataggaagttaccaaaaaaaaaatttttttttattgaccttggatgcagaaaggaaccgcgttggtgtgtgatttgaattttggacttcttgtttcctgccttgtggccacgtcccccttacttggtgactctcagcacttagttgtggggctttttctctctgctctcagacaactataaaagcagactaattgaacagcatctagaacagaaggtggatgtaaagaacattggtcggccgggcgctgtggctcacgcctgtaatcccagcacttgagaggccgaggcgggcagatcacgaggtcaggagatcgagaccatcctgaccaacattgtgaaaccccgtctctactaaaaatacaaaaattagctgggcgtggtggcgtgtgcctgtaatcccagctactcgggaggctgaggcaggagaattgcttgaaccagggagttggaggctgcagtgagccaagatcacaccactgcactccagcctggcgacagagcgagacttcgtctcaaaaaagaaaaaaaaaaaatgagccgggcatagtggcacgcgtctgtagtcccagcaactcgggaggataaagtgggagaatcccttgagctgggaggtggaggttgcagtgagctatgatcacaccactgcactccatcaaacagagccagactctgcctcaagaaagagtgtgagagagatcaaaatatcatttcaacatataaccaatgttattaacaagataacttacattctttctttcgtactaagttttcaaaatttggtgtttatacttggagcacatctcattaaggactgggagcatttaaagagctcaagagccacatgcaactagtgacgagagtatcggacagcgcagtcctagactctagagtaatgaatgagctctctagatgtccggggggtggtatcatgggtgtgtggtgtatgtaaaagaaactcttgaaattgctaactcaaatggctgcagaggctaggcaagtaacaataaaagatgacctgacatagggactaggacccactggagactacaaactcctatctaaaagagccacttttcctgagttttaaaacacagtgatgccaaacaagatgtctgtgagtaggacacacagctaactctgcggccaatatactgcctcagtgaaccgtggtattcaaatgtatgaaacacaaggattttttgttgttttttattttttttgagacagggtctctctagtcatccatgatctcggctcactacaacttccacctctcccactcaagcgatcctcccacctcacctcccaagtagcagggactgcagacacctaccactacacctggctaattcttgtagaaagggtattttaacagaagaatagtaactaggcaaagggatggcaaaccttgaaaacctgaccacatttctttctgggtcctgtacaagtgtgtgcactttaagccatcattgcaatttaggattataatttgacttctaagtagagtttcctactgaggagataattttacagccaacctgggctccctataaattaataagctgatatcatgatttttattatagttaaaattttagacattctgagcttgaaaaaattatttccaggttttcaaagctgttcactagcagactccagacatttttttctccaaatttaagagaaggcatatacatatatatatatatatatatacacacacacacacacatatatatatacacacatatatatatttttttgttttgttttgttttttttctgttttttgttttttgtttttttgagacaaggtctcactcacacccaggctggagttcggtggcatgatctcggctcaatacaacctccacctctcagtttcaagtgattcttttgcctcagcctccaaagtagctgggattacagtcacgtgccactgtgcccgactaatttttttgcatttttagtagagacacggtttcgacatgttggccaggctggtctcgaatttctggcttcaagtgacccgcccacgttggccttccaaagtgctgggattaggagtgtgagccagcacacctggcctacaagaaggcatttaattattttatggttgactgtgaaagctctttgtcacaggaaagttatttgtctttgtactgcttttgcctgatacagtacctggtatacagaaggcacataataaacatttgttaaaggaatatagtccttaaaacttttgaggggctcacagacttaaaacccgagaatctgatgaaggctaaggcttattcagatcttaactgtgccctatccatattccctcaaactaccccagagttcacctcaactttggtagacagatcttgtacaggcccagaacttcttacctcaaacacctgagtaactctatctggaagtgctagcagagttaacattatgagagacaatctacaatcaatgagagatgggatttggtagctaaatattccagttcctcatccccttagtggagccattctgaagcatattctactgtaatgtttctcaaaattttctagcatatgataatcacctggagagatgaatatgacacagattccagccaggctcagtggcttacacctgtaatcgcagcactttggaaggttgaggcggaaggatcacttgagcccaggagttcgagaccagcctgggcaatatggtgagactttgtgagcatggtggcacacatctgtggtcccagctacctcagaggctgaggtgggaggatcacttgagcttgggaggttgaggctacagtgagccaagattgcgtcactgtgcatcagcctgagtgacagaggaagagtctgtctccaaaaaaaaaaagaaaaacgatagagattcttgggcccaagagtttgcattctaaccaagctcctaggaatactgatgctgctgccaatccatggaccacattttgtttttttgtttttttttttttgtttttttgtttttttgagatggagtttcactcttcttgctcaggctggattgcaatggcgcgatctcgggtcactgcaacctccacctcccgggttcaagtgattctcctgcctcagcctcccaagtacaagtaggtgggattataggcatgtgccaccacacccggctaattttgtacttttcgtagagatggggtttcgccatgctggtcaggctggtctcgaactcctgacctcaggcgatccgcccacctcagcctcccaaagttctgggattacaggcgtgagccaccgcacccagcctagaccacgttttgagtagcattgtttctaagactccccagtgggattcagccccaatagctcaaagggacttttggctttcctctcactcccttatactgtttggatttcttgggatcatatcccaaatgaactggtcttgcatccaaatctttctttcagggtctgtttagggtgggtgggagaatacaaactatgacaaccctctccttaggaaaaagtacagaggggcaggtgtggtggctcacgcttgtaagcccagcgcttttaggaggctgaggtgggtggatcacaaggtcaagaggtcaagaccagcctggccaacatggtgaaaccccgtctctactaaaaatacaaaaaattagatgggcatggtgatgggtgcctgcaatcccagctactcgggaggctggagcaggagaatcgcttgaacccaggaggcagagactgcagtaagccgagacgcgccactgcactccagcctgggtgacagagcgagactccatttaaaaaaaaaaaaaaaaggaaaaggtacaaagttttgtatacacgtttaaaggaggtaggccaggcacggtggctccgcctgtaatcctagcactttgagaggccgaggcaggcagattgcttgagctcaggagttcaggaccagcctgggcaacatggcaaaaccccatctctacaaaaaaatacagaaaattagccaggcgtggtggcgagctcctgtagtgccacctacttgggggtctgaagtgggaggatcacttgcacctgagaggtggagaccgcagtgagctaagattgcaccacttcactgcactccagtctgggcgacagagtgagaccctatctcaaaaaaaaaaaaaaatgcttagagggggtatgaattctctggaatttgctcattagattataagtgaagatgaccagggtaaatgccatttgacccaaggtgcactaaaatatgatccatctaatgcagattctggcaaacttaatctaaccattagcagctcatggagttgactgaattcagccagctctccttagaagttattttctcagatcttattgccatcttttcattctttctgatctgcattagtcttactttgtggaacatggcagtaggcctgggactcttagagagtccccatccttgtaatgagcaaaaagaatattgttgcgcattcctatcgggctcttaagatttcttcccaaccatactgctttctaggtaccactgtagtgcccttgtaacccttagatcttttcttgctgtgttcaacacagagcctggcatactataactgtagctggtttctcccatttccttctggattccacatggccccctattctatttcatccttttgggaatgtgtaatctttgacacttatattcctaaacccactttggtataatctggaaactttatggcatgctctagtctgtgacaatcaggataaccctgattataccagcttctaatcaactacataaagcgggtgaacaccagggtcaccaacacccatttcccaactgcggtgcacagcagctttttagctttgccaacatttgggccggcacatgtgtttgtgcgtgattatttgtctcatgtactattgaataaacgtctttgtaagtaactatgaatgtggttttgtgcgtatgggtgtaggtgtgtaagcaactggagctcagatctgtcttaaagtttgcataattaatgtttagtatttggctttaattagtctctgtgcattgttagcctcggctttcatctgctctcaaatatcaaaggaagaatgagttcattttccttgaagtttattgactgttactggtggcagagcaaattccataaacgagcaggttccatatggagcaagtagaaggggagctctgagttggtgaggaaggatgcgtggagtggggacttggagtaaaggatggaaaggtagatctctcctttttccctccattcccataaggatactggattaacaatgggggctatctgctcagcattccctctccaaattggagccagagaggggaaatgatgcaaatcagaggaggaaacacctcacagctcctctgtttctccatccaaggggatgccaatatccacgttgtagtctacaggctccccagagctcagccagggaataggggttcgattgaaagaaggcctgttggagaggttttggttgtagaggaccaggggttcactcagcaagggccccaggtcaaacttgggcatctggaaggtcatgcgtttggaggccttctcatatccaccatagggcattgccgtcctgagaaggggacacattatttaattaagaatcagaataaaagaaacagagccttatcatgagatgctaccctctttgagaatagggaagtctgtgaattctagtttgggattgcatctgtactccttcttcttccttagcatcccattttgccttcctggttagcttgtttccccaaagctaataatgagaaaaggagtctagtgtgtactagagactcttggatagctgtgacccagaccagcatttcagagaaagtgaccccaaatactatagacccaagggcctgaggtcaccttacatgacaatgtagaaaggccaggtgcggtgcggtggctcacgcctgtaatcccagcattttgggaggccaaggtgggtggatcacttgagaccaggagtttgagactagcctggtcaacgtggtgaaacgccatctctactaaaaatacaaacaccccccccccaaaaaaaaattagctgggcatggtggcgcacccctgtcatcccagctactcaggtggctgaggtataggaattgcttgaacccaggaggtggaggttgcagtgagccgagactgcaccactgcacttcagcctgggcaacagagcaagactctgtctcaaaaaaaaaaaaaaaaattgcaatatagagaccccctctctccaaccctagtggacagtggatagcctggctaagagtaattattgttgcctggaaaatccaggctccttaggaccaaatacaagagtacctttctagctcttccctatcctttcacacagacctcctctccatgggctagagaagcctaattccaaaagaacagagacttagagccatctaaagcagggtggccaggcatggtggctcacgcctgtaatcccagcactttgggagcccgaggcgggcagatcacctgaggtcaggagtttgagaccagcctggtcaacatggtgaaaccccatctctactaaaaatacaaaaattagctgggcgtggtggcgggtgcctataatgccagctactagggaggctgaggcaggaaaatcacttgaacccaggaggcggaggttgcagtgagctgagatcatgccactgcactccagcctgggcaacaagagcaaaactgagtcaaagaaaaagaaggaaagaaagaaaagaaaaaagtataaggaaatagaatcatattacagggagaataatggcatcctaaccttgaatggaagagagcctcaagaggccttcagacatgtaaaatgttattcgcatttaacattcaaagcaggccgggcacggtggctcacccctgtaatcccaggtctcaggtaggcagaggcgggaggatagcttgagcccaggagttcgagacctgcctgggcgatatagcgagaccccattctccacaaaaaggaagcaaaaaaaagacaaaaaataaataagtgtaacgttcaaagcaacccaggctcagaggtagagtgattttcccatgcctacacagctaataaatgaccattgagctagaattcaaatcctgcctcccagcaaattttttccttcatcacactgctatgatgaagctgagatagagtgaaaagagcagggcctttgattaggacccccatatccctgccatctctccttagcctccttctgaaacatttgaattagtctccatcctaactaaagacacagtgcctcacactagaatgcatctggttccttcctcaccacccctacctgttgaaggacttatatttgggaagttcagctttggccccataggccagcaggtcaatgccaagttccattttttgctgggggtcaacccccatggctcgctcccatggggaaatataggtcttgaacacagtgatatgttttccttctccgcctgcctggtctcctggtagccatgggagagaaaattcagtcaaataatagcatttagtagccaatgaaaggtaatcccacgcccctacactagggaaattgcaagagccagggactaaagatataatatcctggtaattgtataaggtttgtggcataatgatagtctgtgggcagatctgtgactgaatccgaaaagccaggaaagtaactgaaaaacaaggcttctgggtagaatagacacatctctatatactcctggacccaggtaattcaccaagatatttatgatatttaaactgatattattatatttaatattaagatatttaaactgacctcctctgctccccacactcagcgtagacatcattcctgggacaactctgctctagggaccaaacacattactcttgggtgagtgtacttgcctgatcctgtctcaccaacccctgctgtgccagcagctcctcctctgccagcctggcccgcgggaccacctgtacccccagctccagacccagagcccagatggtgctgctgatcagagccatactgtccggcagagccactgccccctgcctggctgccgcctctgccgttgctcttgctgtatgagaatccctgaccagctgtgcccagctgtccccccactgttggaaggaacttctggaagtgatcctgaaaagaagacaaagtgaggggaaggttagcaatgggtatggaaaatatacaaaaacagaggtatgtttagcaaaggcagaaatagtggctaaccagaagaccctgaattttctgatatttccccctccagttgatgggtagtacatgggctgactaagagaattaaactcttctttttgtttgtttgattttttgtggttttttttagacagagtttcgcccttgttgcccaggctggagtgtgatggcacgatctcggctcaccgcaacctcagccttccaggttcaagcaattcccagcctcagcctcccgagtagctgggattacaggcatgcaccatcacacccggctaatttgatatatttttagtagaggtggggtttctgcacgttggtccggctggtctcaaactccgacctcagatgatccacccacctcggcctcccaaagtgccgggattacaggcgttagccaccgcacccagcccgaattaaactcttcttaagaggtaggactcccttggctcgtttcctccagttatacctagggtaagggcagcgtgttctccacactcccctttctcatccttaacaagtcaaaaaagaccaacacgcctgcccagctttaaaaaaaaaaaatgaaaaaaaattcttttgctttttgagacagaatctggctctgtcacccaggttggagtgcagtgacacaatctcggctcactgcaacctccacctccctggctcaggcaatcctcccacctcagcctctcaagtagctgggactactggcatgctaccacacccagctaaattttgtatttttttttttcctagagacagggtttgccatgtgcccaggctggtctcaaactcctgggctcaagtgatccatctgcctcagcctcccaaagtgctgagataacaggcatgagctgtgtccagccccaactaaaatttgggaggatggggttgccatggagcacccagtcttaattacaaggactagagaaattctgccccctcccttcctcagcttgtccaacagtcagaactctcttctctctccttctttctcttcctctctcctcttggtgcctgttggacctcactggtgacagtgacactgtagcaggtggggggaagtgtggccaaaagggcaacattagatgcaaacccaaagcctaaaaataaccccaccaacttcttcaggaggctctcctggccatcccaccatgtacaccccaatgctccacccagtgtaaccagacccaggcagagaagagtgcttttggcctcctaaagttagatatgagcagctcagcacttttactctgctcctatatgaggaccaatgacagacacttctgcccccggccccatgcaggcatctatttccactctcccccagccactcagagagggtggaggaggaagaaaggaaatggagaaggcccttcttcctcagctataccatcctgtgcctggcccctctccagtctcctctttctttggagaaggagcctgactagaatatatcttgaaggaccgtttcagtctccacacctggggcttcttagggaatagactgaccctttaaatggaagaatggctcaaatgggaggtggctgtaaaaactcaattaactctttctagggttgccagatttagcaaatcaaatataggataccacttaaatttgaatttcagatgcacaacaaatttttattttttttttttagatgggttctctgtcacccaggctggagtgcagtggtgtgaacatggctcatgttcatgcatcctctaccttccaggctcaagccatcctcccacctcaccctccagagtagctgggattacaggtgtgcgccaccagacccagctaactttttaattttttgtagaaacagagtcttgccatgttgcccaggctggtctccaactcctggactcaagcagtcctcttgccttggcatcccaaagtgctgggattacaggtgtgagctaccacacttgacccaaatacttttttagtatagatatgcctccaaatattgcttgggacttacttatactaaaaaaattattcatttgcatctgaaattcaaatttaagtggacatcctgtatttttattttaatgtcccaaatattgcatgggacatatttaaaaaagaattcattgtgcatctgaaactcaaatttaattgtatattctgtattttaaaatttcaattttattctttgccttatcttcttccttttttcttttttctttcttttttttttttttttgagacagagtttcactcttgttgcccaggctggagtgcagtggcacaatctgggctcactgcaactccacctcctgggttcaagtgattctcctgcctcagcctcctgagtacctgggatcacaggaacccacgaccacgcccagctaattttttgtatttttagtagagatgggggtttcaccatgttggccaggctggtctcaaactcctgacctcaggtgacccacctgcctcggcctcccaaagtgctgggattacaggtgtgagccaccatgcctggctgccttatcttctttctaaaatttttttaaatttttatctttatgtcccaaatattgcatggagcatacttcactaaaaaattattcattgtgtatctcaacttcaaaatacaagactggactgccccactgggcatcctgtgttttatctggcaatctatctttaacacttacctttactgggaaggaattttctccctaagggtgtggtattctccaacccttcagtggctctatgatgaaaactgggtttcagaggtgggctgtaactcaccctggagctgttgcgggctcaatatatctgggggtttaacaaatttataaattttcagggaggggatgttgactgcattttggaggttcagggcctactaacaagctgtcagaacaggcaccaggctttgagatagtgataaagttccagactcaccattgagctgtcagagaaaacatcagggtggttctcataaataaacttctccaccctcatctgccgcagtttgaacatcttggagccccggttggtaagcagcgacagttcctccaacatcacatcccttgggacactgatctttttgcccaggttcaagcctgagctctcctgtccacctttcagggaggcaaagaagaagaatcaagggaaagaggaaagtagggttttctgggctcagaatgcagacctcatccacaactaagtgtgtatgtgtgtcctggcagaggtcatttaggggaacaaatgctgtctagtttgtgagggattttgatttcctgggacttggagagaatgcatgggaactggggtgcactgtggagataatgggaatactagagtggagaggccaatggggtaaaagaggtacgggcatggggtacagagcaaaaggagtaaaggaacatcatagatggaggccattggagaaaccatggcatcaggaaaaacccagaggccaatcttgtgtggagtccaaatacagatgccatatatatatatatatatatatttgtttttattttttattcttttttttcatttttttgagacagagtcctgctctatcatccaggctggagtggaatggcgcgatctcagctcactgcagcctccgcctcccaggttcaagcaattctcctgcctcagcctcccaggtcgctgggattgcaggcctgcaccaccatccctggctgatttttatattttttggtagggatggggtttcaccatgttggccaggctggtcgcaaactcctgagctcaactgacctaccagccacggcctcccaaaatgctgggatgacaggcgtgagccgtggcgcccagcctacattttatttatttatttatttatttatttatttatttatttatttattgagtcagagacttgctctgtctcccaggctgaagtgcaatggcgcgattgcagctcactgcaacctccatctcctgggttcaagtgattctcctccctcagtctcccaagtagccgggattacaggcacccggcaccatgcccagttaatttttctatttttgtagagacagggtttcaccatgttggccgggctggtcttgaacttctgacctcagatgattggcccacctcagcctcccaaagtgctgggattacaggcatgagccaccacgcctggactttttttttttttttttttttaatggaaatgaggtctcattatgttgtccaggctggtcttgaactcctgggctcaagtggtcctctcacctcagcctcccaaagtgctgcgattacaggtatgagacacagccccagccctatttgtattatttattttgagacaaaataaatatatcttaggatgaactctgtcacccaggctggagggtagcgtcgcaatcatggctcacggcagcctccacctcccgggttcaagcgatcgtcccacctcagcctctggagtagctgggactctaggcacatgccactacacctggctaatttttgtactttttgtagagacgaggttttaccatgtgcctaggccagtctcaaacccctgagttcaagcgatccaccagccttggcctcccaaagttctgggattacaggcgtgagccactgcacctggcccagacttctgtcttaactactttcccttttctttccctcagtgagctctggctccaaagagtctctaggtattgaagagctcttcacatgcatgcacccctgcccacccccaggaaacatgcctgtgcagttttccattttaagtacttacacaagctccctagctctggggaaagaagtaagggaaattaaccacttattgagacctgagtctgtgccagtctccattatattttcttcctcaaatatacctcactgactcatgggtcctgtggtcctggacctgtgcaggtaacatggcagggtattgtctcagattatgaagtgaaaagggtagaaggtgttgaatcttttctctctttctccttacccttcttaatcttccctctcccactccccatcacccgccttcccaccacttaatttctcttgtttgttcaccctaagatatatatttctgggactcttggtttagggatgctcttaagaagtcccacactagggagatgcaaacatgtcctacctccagtgagttccatgatcagcttgctggatttcctcttcttattaggggccggggttcctgagagcggcattgtggaggtggattcagcctggacagggtgggaaggaggagttggtggatggacagggactgggaagagtgagtgtctgtaggagagcagcacttcttaacctgggtttaagggcttgaggggacaaaaaaatttttttttcttttttagagacaggatctcactctgtcgcccaggctggagtgcaatggcacaatcatgcctcactgcagcctcaacctccctgggctcaggtgatcctccaacttcagcctcccaagtagctgggactataggtgcgcaccaccgtgcctggctaatttttgtattttttgtagaaatgtggttttgccatgttgcccaggctggtctcaaactcctgggctcaagcagtcctcctgcctcccaaagtgctgagattacaggggtgagccacttcacctgacccagattttcaaagaagcatgtatttccccaaaaggtgaaaacttgcgctttagggcttctcttttcttgggatacaggacaggaagtatagatgcacaccagcccctgttgtctaccaacctgttgtgagctgtttttcatagagtcagtgcaggaattaggaacatagctaggtgtggggagtgtttaaaaaacaataacacaagcagggcaatgcacccaggtttcattggcttggcatgatttgaagtttttatttgcactgggatatcagactggggctgtgattccaggctctggtctctcctcagtcttcccccagtccccaggaggacagagaaatattctgccagggttgaggagattcagccaaaaacactctccataggaaggagaggttgttgctccttcatcaggccagctggaacatggcctgggaagtcatggccctgctcctgcaatcactcccgccacagaccccagagtggaggcaggtgtggaactgggaagggtagggagcattcaaatcccgacacgtcaattcagcaatatcatagcagtggggaattgaggtggggcagaaacatagtaataggatctggcaatggaaagggacaaactgggataagatggactccaatcccttcttaagagaagttggcactcagtgaaatgctgtcctcttctaagtcctgtctcaaaaaatacatctgcaactctactgacttagtggggtctcccttcccattcttccagtgcctcccccgacatctccattccccccaacctcctgggcccctctccttccaactctccttcccctctccttccaactggacagctgggagctgagcatagatgaggagaggggagactcccccaggatcaagaatcacaattgtagacacagacacagaagtcaacacagtgggctccagcctttctaacgatagagctggagacttaccggctgctcgggcagtggtcagctctccctggggtccagcagctttggaggactgagctgctgtgaccggagaacacgagctgggcaggcgtgggggcagcactggcagtgggggagggaagttggttattaatagagatgatgagcgcaagcagctcaaatggcacagggggtactgagaccctggaaccaagatccctccctccttgcccggaggctcaggaaggagggaaaaggcctttgggattctcccactgaactgtctgagccagggatcagtctgcccagggactccccttcacattgcacctagagcctgagatccaaagaagcacttagggagaaactgaagactgagagggagacaggaagtagacagcaagtattggataggaattcagtcagagagagagagtctggggaacatgccctgagggccacacagagccaatccagggcagagtggagagacctgtgggtgtatttggagcagggagggcttaaagtgctatatttggggacaaaaagggaagtcttcacagtggaactgctcttttaaagttcctggataggttggtcttttctcggtaagggctagatcttggcaggttaagggaccaaattaactaaacccagtacctcctacaaaggaatgatgtggggaagacttgacaattattctgtctgcctcactccctattctttcctcttgagctctggcagttttaataaaagacaaacacttggatctgcatttttttttttttttttttgagatggagtttcgctctttttgcccaggctggagtgcagtggtgcgatctcggctcactgcaacctccacctcctgggttcaagcaattctcctgcctcagcctactgagtagctgggattacaggtgtccaccaccatgcccggctaattgttgtatttttagtagagacggggtttcaccacgttggccaggctggtctcaaactcctgacctcaggtgatccacccacattggcctcgcaaaatgttggaattacaggcgtgagccaccgccaggatctggtctctaaggagttattctctagccaccacgcccagccaggatctgccttttaacctccatttgctgttgagatgctcagttcaacctgctgtgcgggatagacatcgatgtctccctgagaagcacatataggctctctgaggtttcttttcttcttcttttttttttttttttttgagacggagtctcgctctgttgcccaggctggagtgcagtggcgcaatctcggctcactgcaagctccacctcccaggttcacgccattctcctgcctcagcctcccgagtagctgggactacaggcgcccaccaacacgcccggctaaatttttttttgtatttttagtagagatggggtttcaccgtgttagccaggatagtctcgatctcctgacctcgtgatccatccatctcagcctcccgaagtgctgggattacaggctctctgaggtttctacttgagatttcctgcaaagggagcacataccacataggatctggactgtgccatttgtactgttccagcggagtctctgggcagggccacaggcttgaaagcccctttggggaaagcctatcatttccccaggcccttcttcagtagctgcatgatcttcctccaccttctgcttagattctggaaccagttgctgcagcacttctgctgcagccaccacaaccctgttgctgctacctgaggaagtggctttatttatttatttatttatttgagacagggtctcactctgttgcctgtgctgaagtgcagtggcacaattttggctcactgcaacctcagcctccccaggctcaggtaatccttcgacctcagcctcccaggtagctagggctgctggtacatgccaccacgcccagctaattttcatatgttttgtagagacagggtttcactatgtttcccaggctggtctcaaacacctgggctcaagcaatcctcctgtcttagcctcccaaagtgctaggattataggcgtgagccactgtgcctagctggctttttaaaaaattatttctttctttattttagagatgggggtctcactatgttgcccaggctggacttgaacacctgggcacaagtgatcctcctacctcagcctctgagtagctgggactacaggcacgcaccaggaagtggcttttgtaacttcctttgtccccttctgagctctttactcttcctgaccatgtcctttttccatcctgtggagaccctaaaaggtatcccctcacagttggcttctgcccaggctagttatgcctccagacccctcatcttttgtcctcctccatcccctcccaacccaaggaagcaattagaagataaaataggccgggcgtggtggctcatgcctgtaatcacagcactttgggaggccgaggtgggtggatcacttgaggtcaggagttcaagaccagcctggccaacatggtgaaacccagtctctactaaaaatacaaaaactagtcaggcatggcggtgcgtgcctgtaatcccagctacttgggaggctgaggcaggagaatcacttgaacccaggaggcagaggttgcagtgagctgagatcgcaccactgcactccagcctgagccacagagggagactccatctcaaaaaaaaagaagaactataaatagctaaaggtgacttcatcatcactaccaccctcaccctcaaaaacaaaaacaaactgaaagtttgatctccttcaactgagtacccaaaacgactgagtgggtgaagacaggctatttaacctatggtctctgagatctttttttggaattctaagacagtgcacttggaagagtctgcggcctgggtctgattattggcacaaatgtgccctctgctggcagaatcagagcaatggcactttccttctctgaagtctaattctcacctacctccaacgccctcccttctttagtagtctcaattcagctttattcttccctctcccatcccaccttcccctccagccctccagccattgctttctcttcatttacttcccagagactgtttaatatggttgcttcctctaaggagcgaggaaatgttgatagcaaagggctcagagggcctttccaacttctctgagttctgtgaactgaagccttacctagaaagtatgaggcaagggagggaaaggggagaacttggatgaagactgtggggagagggaaccaagaagagtgatggaggtggctaaatcaaagcaggacagaatttgtataaaagagcaaaagacctgggaacaaagggcaaaaggatgaaaaatgggagggcaggaaaagagacagatcagaaatcagatcaggggaatgggttaaagaagattaaggagagatcaggatttaggaataaaactagaagataacagcaacagaaggtatggggcataaatttattcttgtgcacaaaccaaagtattgtgactcacacccaacaagcaaaggaaattatcactttccagattacacagcaaacgtagctggtggtggtcttggtgagaagggagtccatactaagattggagatcaggacctgaagctgaaaagaagcaatagctggggttttgagggatggggtgggactgaaaggaggttttggctctgggtatttccctactctttcccaggcagtcatggcaagctgcagaagacacactgaagaacagactcaaggaaaatcacacagacaccaaccgttctttcaacactcagcacacaccctcacacctcccttccaccatcattcccttccattctaacattcttctccctcaaatttttttccaatccccctctcacacacggttggtttcttgttactcaactttaccttctcccaatatggcattgtccctcgccacacttctgtctgtggctcaatcacttacactcatttctgccatgcttctgattttggcctcacttgccacactctggctctcttctcctttctctcaagctcatgaggcaatgaagccaatgatttgttcattctcggagggaattttctttctttttttcatttcctgggtactgggttgctcagcactggcctctcaagttgctaactttttgaaatcctgaggtatagaattctttgttctattcctggtctagctggtataactcagcccatgcaaactgtcctggcccttcagtcttttcatgctccataactttcacaagatgctgtacacctgctacagacattggtctctaaggagttattctctagtgaatctctttctcccactcaactccatgtggggatatctgacccttctatcagtacaacgataagactcagattgggtcttttgtttgtttgtttgttttgagacagagtctcgctccgtcgcccaggctggagtgcagtggcgcaatctcagctcactgcaagctccgccttccaggttcatgccattctcctgcctcagcctcccgagtagctgggactacaggcgctcgccaccacgcccagctaattttttgtatttttagtggaaatggggtttcaccgtgttagccaggatggtctcgatctcctgacctcgtgatccgcccgcctcggcctcccaaagtgctgggattaccggcgtgagccaccgtgcccggcctcagattgggtctttattttgacctcccctcttattcatgccttagacggaagagcacacacacacacacacacacacacacacacacacacacaggcctaggtatatgccagtcaagcttgggaaagcagagtggggggtgggggtggcttagtgcaaacaggggtcagttcagtccctttgctgtgtgcctggtggtgagcttcttgcctgaagtcccagtggtcacttctgctctgtttacttctcactgaacattaaaatgaggcccagggagaaaagcacaaatgtcaaggaagagagatctgtggaggaatatgggtggagaagcctggaaataaagacagagatccaggaaaggaaatgcagagacaaagagaggcaaagataccaaagcagacatacttggttggaaagcggcagggaggtagagagtgaggaggaaggtgggggaaggggacatcaacttggaaaccatctctggcaggaggcaatttagcttccagatgcgtgacaggggatgggatagggtaggagaagcaactttaggaactggatgttccacctctccttggtcctgggacctgtgcctgttcactggtgccctgccccaggcctccacacatgagcttgcaatcctgttctggtggctgaaaatcggggcctggctacctggaaaccgcaggagctgggagaagccccaaggcccctgggagcctctggaggaggggctgggctaggaacaggggctgaggccagttctgttctccagatgggctcatccagtgtagtggctgctcggggggcaagcacagtgggagccaggggttctgcagtgggctggggtgccggagtggaaaaccggcgaatctcctggactcgggcagttttgggggaccctgaggcgatagggccaggagtcgggggaacctcatcaaaacagaacatggcagttttaagttgatagggctgatgccgcataaaatctagagccttgatgccctgcttgggtgttgcccgaggcccctgggattgggccttagggagagttcgggccgcctgggggaaaaagggagagagcagtgggttgtaagcaataggaggcggggcacggatgttgggtgaatatttccaggaagggggcagagacggggtaggagaaggacttctaggccgagggccaagaccaggaccaggtgtaccttccaccacatacctgtccgcacggctctgccgcttagcaaacagctccccacccctgccctgcagccttggtggctcagggattccagccgaagaggctgccccattcacgagcccatcaaggagccctcgagatgggggcttaggagccactgggggtggagtcttaggagtcatagggggcggggtcttgggagccattggagggggggtcttaggtgtcacgtgaggcagggtcttgtaactcctggcccctactggctgcatgaagttgcaggcttcagccccgaggctcagagcatcttcttcaggaccagattctgcacccccggcccgaggcttttcatccaggttctgtaccagcgatagcagctcggggttgggcgagttcttcgtctcctcctttcccggccggaacatctgcttccgggtcccccggcgccgggcctcctgcaggatacccgtgcgggcagctggcacagagatgcgctgctcgcgagcgctggggggctcaggagcccctgggcctggggcaggcgcctctgggcgcgcagagggtcgcaaaggcgcagataggaagatagaagcggtggaggtcatggcagctgcgctaggaggagcggggggctctggagctccacctggggtgacaggccgactaggggctgggatgtacagggagctggtggctgtcacagggcccgaggagcgtggggtgctgggggaaccagagactggcgcgtggctgggaacccctgaagtgaagctgggcagaggggtgggcccctgcgaagacaagaaggggggtggggcggggctgaggccccccaggctgtcgttcgcccttttgggggctaaaggccggaaaataaccgaggtggtagttggccgctgcccttgtaggcccggggtaaagggcctggctgaccggttaaagatgcttggagctggggtcggggctccaccacctggttggaagggtctggggctggctacaggcgccggcaaggggctgggtgggagcacagctgcctctgggggagcactctgggcccgaggtggtgactgcaggccttccccgttgagcatggctgctggttcgacccgtgccagttcctgggtgctggagtctgcgcgctggcgctgctgttcaaagagctgcacccctcgcccagagacctcactcagctgccctcccagcccagagccctggccctctgatgctcttgagcccgccctggcaagctccatgtccagatagggactgtcccagtcagattgattggtgaggctgcgggcgtcagagaaggcttcttcgtccagctcggactcactcgtggggggaacgccgtcctcctcctcagcgcctgtcccagcagcagccccgaagctcaccagggtgtacttcttggctctctgccgccgtttcttaaacataagtacccctttggagtgggggttgggggctgcagtgagcagggatgcaattgtcctgcatttggtcttggcctcttttatgctcttctcttggaggctctctgcacgttgcagttctggggaggccaagaggtaaaatggtcaggggggcttcccagcctcttttagtcctgttccccaaggctttcaccccccatcccagcaagctccctcttgcactgacccgacccacaatgtcccctgtgacaaagtcctctgacttaggggcagagtggagggtgaaaggtgaaaccaaggacagttaaagataaggcagagtccagttggctgccctgacactgctctgaccacagctcttccatcccattttactgctattctgctcctatcttccaagagatgtgctcttatccaccccacacacattcctcacctgcctcccattcctgactggcaatgggagggggaggagaaggatgtgtcactctccgtggcagacagggagataagcaggtcccagggagaggaaagatgagaaggaacactttccacccatcatagggaccatgttaggaggcttctcatgaagcttaggactcatcctctccactaccccttacccctatgatatgagcacaaagaacccttagcaatgaggatcttcattcacaattccaccctcctcatgcaatccacatcatacacattcacagaaataactcccaccacacagcacttcaacaagaatatccatctagtgaaagccaactgtaggcgtactttctcctatttacttttctctctcattcacatataccccagcttacatacagctccattcacatacacttatgtaaatacacatgtgtgcacatcaaaacaccatcactcaaatacattcacacacctacatgctctaggtggcccttcttcccagagacctccctgcagagaccctgttactaacagtttagacagaagttaaagttgatctcggccttccaactgccagggcagtcctctgggcttcacacccctgctactcacagtcaggggtagtctccatccaagatgcaggaaaagttagagtgttgttctccaaggcaacactccaaatctttaggatacctcaaggtcgccagctaaatatattatttaccccaagctggggatggtagtggggtgggcttcttcaggggtcagaactgtctctacgtagagagctcaggcagccactgccagccaggcacacaaagactatgtgctaaagggaaccagggcagggctttccatgccatgtggggcctgggtaggtggggccaggaaatgggagggctaccctgctgcgaggaccccgccttgcacatggatactctctggtccatggtccccagttcctcctgaaaaattattgagattccatctactttccactcaaggtaccatgctcctttgtaatgagctcctttgtaatgagctttgtaatgagctcctttgtaatgagcgtggtatcttgagtggaaagtagatggaactttttcatttttgtcattcctctcatcccagtgtttataccacagaatagtggtatggatgagacaacaggccctagagtcagagttcagttcaggtttttggtttctgggatagttacctcacctcattaaagttcggtttcctcatctgtaaatgagggtagacaatggctacctcataggattgctataaggattaactgagataatatagtaaatttagcacttaacacagtgtgaaggcccactataaccattactattgaagtcttcttgacactatactttcttgatatatatggatactttcttgttcacacatatcttctcccatgactcacacatacatgccttcatgtattcataatgtactcacacacgctctgttcccatgagttttctacagctcttgtggtcagaaacccctttgacatgtgaccacagcatcactgagaaaggggcagtgaaactctcctgagaaaaggaggaagaggacagcaaaaaggaacaagagagtaagacctttcccaaagactacccttcctaaactattgacatcttcccctccattctagaccccagactctcatagatatgggagggtagtacctgcatagaacgagtcttggagctcaggaactgggtctggggctttgtcatagctggcttggctgaggggctcttggctgatgggctcaaaggtctccatgctgagaaaggcggtgttggctggagcaggaccagcttgagccaccccccacgccttttaaagcccctttgtcttgtccccagagctggcagctgaatgagctcactgtgctatttttggagcctggccctctcccttctctgggctgccccacaagtgccggtgtgatggatgtgggcacctgccttcccttcccccaaccccaccccagtagacaatgaggtctgcttgactaaaaatatctctgagccagtagctacagtctcatccagcattatgggaagggagggggagataagtggagaattgaggaaagcataggatcctaggcacgcatctggaattcctgggatattggacactcagggatgtcagactctcaactctcatgtccttagcctccactccaaactgagagacacaaagttctatagatcaggaatcaaaatggtggaggagagggaagaaatataactagagggggaatcatgagattttggaggtaacaagaacggtctctgtgggaaagcacgggaggcatagagcagggagaacgtttacccttagaccttgttctgtagctcacatcaaaaatagcaaagcctgagataagtggaatgggctttttctgcccaggccaacattcttgcctgagataaggagccaaagctccctccctctgccacttcctcgggatctcatgatcatcccatagcctctcagtccccaggaatccgaactgaacttgcaaatgtcaaaggtgcctgctattaatactataaagaatcctttggccaatggctcacgcctgcaatcccagcactttgggaggccgaggcgggtggatcacaaggtcaggagttcgagaccagcctggccaacatagtgaaacgccgtctctactaaaaatacaaaaaattagccaggtgtagtggcgggcacctgtaatcccagctactcgggaggctgaggcaggagaattgcttgaacccaggaggtggagggtgcagtgaaccaagattgcactccagcccgggtgacagtgcaagactctatctcaaaaaaaaaaaaaaaaaaaaaaaaccagaaaaaaaaaagaacccctgtagctttgacccacttttatttattaatttttattatttatttatttatttatttttaagacagggtcttggtctgttgctcacgctggagtgcagtggcgcaaacatggctcactgcagcccaaacctctcaggctcaagcaatcctcttgcctcagcctcccaagtagctgggaccatagacatgtgccacagtgtttggctaattttaaaatttttactggagacgaagtctcacgatgttgtccaggctggtctcaaactcctggcttctgccgggcatggtggctcacgcctgtaatcccagcactttgggaggccgaggtaggcatatcacctgaggtcaggagttcgagaccagcctgaccagtatggtgaaaccccatctctactaaaaatacaaaaaattagccaggtgtggtggcgggtgcctataatcccagctactcgggaggcagaggctggagaatcgcttgaacccgggaggcggaggttgcaatgagccaagatcacgccattgcattccagcctaggcacaagagccaaactccatctcaaaaaaacaaaaaacaaaacaaaacaaaaatcctgcgttcatgctatcctcccacctcagcctcccaaagtgcttggattacaggtatgagccaccttgccccgccttcaacctgcttttaaatactcccctgtcctgtgtctgtactctgctttcacccaatcatgacacacaataacaattatcaccaccaccaaacccttcatctatttgtgtccctttccaatttccctacttaccctgttcctgggttgaactgaatcaccttacccttttgccacattggttcaaacagcaaaaataatggtggccatgagaataattatgctccccttctactcattacccctcctgtccccaagactgtatccaagggtcccaaggtagggagaatgtacggctatagaaggctggatttaaggctcagattgaaggatcctggctggggaaaaggggttcaggcactcactggcttgcttggccttctgggtgtaggtggtagtaagatcttctgccactgggtggggaacaggccccaccatagggatgagatgaggaccaggtcggagggggccatggggtaacagcagagcctcagctgggggtggctgaagggctgccccatcctcccaagacggggagctcacacggctgtcaccctggctgggagggccagggatagtaggtgctggctctgcagggctgtcagacaggtagacctcatcaggtggggcacccggaggggtgggccttgtggggcctcggcggcgaggtcgacggggcttctcctgggtggcagggccatcagcatcactgtcagtctctccgtagtaagcctcactatcaggaggtgaacgaaggctcccaggctgaagaggctgaggaactggagcaccagggggctcaggacttagtggagataagggtgacagcacctgaagctcatggggagatggagattgcacaggaccctcgtctgctaacctggataggaaagatgacagagcttgagagatgggctgggtactgacagctagagagatctggaagggatggagggaagaggtaagggggagggaagaggtaagggagagagaaggctgtcatacagttggaatgggtgggccgggaagagtggagatatgaagacaaactgggaggcaaatgtgcttgaagggctgtgagtggaaataggcttagaggaagatgtaatgaggaggaaacaggccaggggttgaagtaggctcatcagtcaaatacccactgacatccccatcccttaattgcagatacattcaagccctctgggaggcagacacaaaccatctgcactccagcagaaacgcacgagcagaaataggtacctgttagttgctaaagccaggccagtgagacatagagctgagacaggcaatgggagccctggattaggggaagagaagaggagagaggtccataccgctgcacagtgaggacaagctgatttcctgaggcatcgatgaggctcatggcactggcatgggagaggttggtgcaagagaccccattgattgccaagagctggtccctctctcggagtcctgctctgccagcctggctccgtcttcgaatctgagatgttgaaggagacactgtaggtaagagggggctccaaagggaatagaatgaaaggaaaagatgggaaggacccacaggaggggattttactttgcagggtaagaagggtggggagatgcatggaagtggctgcagttgaagtggcctgtctagagggaagaaagtatacagactggagaaagaaatacatcatatggtgggaaatagggtaaccattgaatgaaagaggcttgggaagaactgcatggggtaggtaactagaaatggtggttattggctgggtgcagtggctcacgcctgtaagcccagtgctttgggaggcctaggtgggtggatcacttgagatcaggagtttgagaccagcctggccaatgggtgaaacgctgtctctactaaaagtacaaaaatcagctggccgtggtggtgtgcgcctgtaatcccagatacttgggaggctgaggcaggagaattgcttgaacccaggaagcagaggttgcagtgagccatcatgtcactgcactccagcctgggcaacagagtaagactctgtcgcaaaaaaaaagaaaagaaaaaaaacggaaagaaatggtgattatctccacaagctttttctccaagggcaatatctatattggctggtaattctctactaggccttgtaaccccaggcgccattacacagtcaagattttagaacagtactccaggttggagggagtccagcggtattctgggagattgtgattatttgggtatatgtgtgccatgtatacacacaaatgtatatatgccaaagtaataatagtagtagtggctaccatttattgagttcttactaagtgttgggcactgtgctacatgtattattgcatttaatccttagaatggttccatgaagtaggtacaggtactattattacccacattttacagttcggaaaactaagcctgtagggtgaaaccaaaaggataatgacttcatctgtgaggccagatcttgccataaccctcctagcacctaaaaaagtcttgcctagtgagagaaaggatctgacctagggaaagagcactgaaggcatgggcagggcagggtgaggcagggtagggctgggctgggctaggctgttcgaggcagtttcagttcatcacatatcagtttagtcagagagaaattagaaccttccccgtatttctggagtttggagtagaggcacatacccaagagaacaaacactggatgaccagagctgggcctctgataccacagtgctgcagggaactgaagcagagcctttccttttcctctgctccctggaaaccgcgaattctcttttctaatagacccccacaggaagcctgtggtcagacgctactcccactatgagacttgagcatacttccctgcccaccacccaccccatcttcacagcctcccacccccccaacccccgccatatgccaccacacatctcttcccaggatcccttgggttccctttccctgaagcctcatttcaggggctctcccttaccttagacacctgtaacggtttcctctgctcggcccccccatgaagtcggaagccccagggggctccccctgatagtgtgaccagcacctcctcctcagcacccatcgctcagcttggcctatggcccccggagtttgaacagtgtccccaggagagaagttgaggtgctcgaaccccgtctgggcttcctgtccggctgtcctgctcctgctgccccaggcctcccccccacaccacacaccacaggcaggcaacttggccctgggatcattacagtccagcacacatgtcccgtcaatcgcagatgtgctcaaaatagatgccgcttgtactcccctccctcccccttctgtgttactcctagagctaattatagtacaaacttctgccctccatgttcccaattctcctgcatgggccttttattcaggactcagaatacaaactctctgggctctataaccaatgtacaccctttcaggaactgtgccttctctaataggaccatgggctaatctcaactgctttcctccaaagaccctttcaaagtggcagcagcaggggcttcaattccatagctggcaaagaatggctgggcttgctccaagatcccaggaaagaatgcactctcgctatataaatttatctgttaattaataaatggtgggccaggcatggtggctcacgcctgtaatcctagcactttgggaggccaaggtgggtggattgcttgagtccaggaatttgagaccagcctgggcaacatcgtgagatggccccccatctctattttcttattattaaaaaaagttaaaaaaaaaaaccaaaaaactataggctgggcacggtggctcacacctgtaaacccagcactttgggaccaaggtgggcggatcacgaggtcaggagattgagaccatcctggctaacacgaggaaaccccgtctctactacaaatacaaaaaattagctgggcttggtggcagacgcctgtagtcccagctactctggaggctgaggcaggagaatggcgtgaacccgcgaggcagagcttgtggtgagccgaggtcgtgccactgcactccagcctgggtgacagagcgagactccgtctcaaaaaaaaaaaaaaaacaaacaaacaaacaaaaaactataaaaaaacaaattacctattgcaatacatacgtggtcatggaaaggtgtgtaggtgtgcataaacataccaacccatgttaatacaatctctacttgtctctaggtttccattacgagaatgtctctgttacaaggcataacattatggtgctataactgtgattatcaaaggctacagagtttcataaaatagctgcccacctagtgtatgctaaataccgtttgccttggcatatgcctctatgtcctagaaacacttgggctgggtgcagtggctcatgcctataatcccagcactttgagaggctgaggcaggtggattgcttgagcccaggagttcaagaccagcctggataacatggtgagaccctgtttctacaaaaaaatacaaaaaaatttagccaggcctgcctggtcacatgctcctatagtcccagctacttgggatattgacgtgggagggttgcttgagccctggaggtcgaagctgcagtgagtcgtgatcctgccactgcactgtagcctgggtgacatagtgagaccctgtctccaaaaaaaaaaaagaaaaaggggagaaaacattggaggcaacagagggagacctgatctccaagaagaaaatagttgggattttggggtcagaagaattgaacttgggttcttttttttgagatggagtctcgccctgtcgcccaggctggagtgcaatggagatcttggctcactgccacctctgcttcccaggttcaaacaattctcctgcctcagccccctgagtagctggggctacaggcatgtgccaccacacttagttagctttttgtatttttagtagagacggggtttcgccatgttggccaggctggtctcaaactcctgacctcgtgatccgcccatctcagcttcccaaagtgctgggattacaggtgaaagccactgcacccggccacccccttttttttttttagaccgagtttcgctcttgttgcccaggctggagtgcaatggcatggtctcagcttactgctacctccacctcccaggttcaagcgattctcccgtctcagcctcccaagtagctgacactacaggcacccgccaccatgcccggctaatttttgtatttttagtagagacggggtttcaccattttggccaggctggtctcgaactcctgacctcaggtgatccgcccacctcggcctcccaaaatgctgggattacaggcatgagccaccgtacccagcttgaatttgggttcctcaataacttactagctgtgtgacctcaggcagggcagtcacttggcctcaccagtaaaaagaggatttaggccaggctcggtggctcacgcctgtaatcccagcacattgggaggccaaggtgggtggatcacctgaggtcaggagttcaagaccagcctgatcaacatggagaaaccccgtctctattaaaaatacaaaaattagccgggcatggtggcgggtgcctgtagtgtcagctacttgggaggctgagacgggagaatcgcttgaacctgggaggtggaggtagcagtaagctgagatcacgccattgcactccagcctgggcaacaagagcgaaactctgtctcaaaaaaaaaaaaaaaaaaaaagaggatctaaatatctattcattcactattcaaacatttattgagtgttagctacatgtcagccattgtgctataccaatggatttcaattaaccctcagtacatattaaaatcacctagaaaacgtttacagctactgagtccctaaaaaaagacagcatatcagcatataggattaaatgatgatgcaatgaagttttacacacacacacacacacacacacacacacacacacacccagatctcatccttagggacagattttattggtctggtacctggtagtggcattttaaaaagcaccacaaggccgagtgcagtggctcacgcctgtaatcctagcactttgggaggctaaggcaggtggatcaccttaggtcaggagtttgagaccaacctggccaacatggtgaaactccatctctactcaaaatacaaaaattagccaggcgtggtggcgcatgcctgtaatcccagctacttgggagaatcgcttgaacgcgtgagggagaggttgcagtgagccgagatcacaccactgcactccagcctgggcaacaagagcaaaactctgtctcaaaaataaaaataaaaagcgccacagatgattctaatatgcaaccgaggttgagaaccactgagtgcagatacagaaaccaataaattgcaacacattagtctctatcctcaagaaactatggtaccgagctgggcatggtggctcaggcctgtaatcccagcactttgggaagccaaggcaggcgtatcacttgaggccaggagtttgagaccagcctggccaacatggtaagaccctgtctctactaaaaatacaaaaattagtcaggtgtggtggcacacatttgtaatcccagctacttgggtggctgaggcaggtgaatcgcttgaacccaggagacggaggctgcagtgagcaaagatagtgccacagcactccagcctgggcaacccctgtatatgcaatatttgttaaccagtcccttttggtgcccatctaggtacaggtctcatttttcgagctaaagtatctataatacactggaagtaatagatgtcacctccatattgtatgccaaacctaataagcagagcaaaacttttcatccaagtgatttgattaacattttaggatgtttctaatctctcaataatacaaatatgctacaatagatctgtgtgtttatcctttgggcacctgtgtgtgcctgtgcacacctggagaataaagtcctgtgagaggaaccgccatccaaagagggtgtttcagtctgtactgccaccaacaatgtgctcgtgcctctgagcttgcgtttggatcaggagaatttgaaagtcatcaggaaccaaaccaggatacaaggtccagctgtagctggaaagtggcaaacgttccaaagctaagacattggctatttctgggctgttcacaaactgtgaggccaattccagatgagatccagagaaagggtgagcagctcacttattttttaagcaaaacacattttcttctcatttcttctaagaacaaatggcttccagcaagagaaaaaggggatgcaacatttttacaaattatttctttttttattaaaaaaattttaagttaaatgctaaagatatgtttaacctctctgatactgacttgctcatgagaagaaagagagagggccaggcatcttgcccactactacccactatcaacacttaggcctgacatcagtctctcaattaatattctgggccaggtgcggtggctcacgtctgtaatcccagcactttgggaggctgaggcgggtggatcacgagatctggagatcgagaccatcctggtgaaaccccctctctactaaaaatacaaaaaattagctgggtgtggtggcaggtgcctgtagtcccagctactcaggaggctgaggcaggagaattgtttgaacccaggaggtggaggttgcagtgaaccgagaccatgccactgctctcctgcctgggcaacagagtgagactccgtcttaaaaaaaaaaaaaaaaaaggccgggtgtggtggctcacgcctgtaatcccagtactttgggaggctgaggcaggcagatcacgaggtcaggagatcaagacctttctggctaacacagttaaaccccgtctctactaaaaatacaaaaaaaataaaaaaaattagccaggtgtggtggtgggcacctgtagtcccatctactcggaaggctgaggcaggagaatggcgtaaacctgggaggcagagcttgcagtgacctgagatcatgccactgcactccagcctgggcaacagagcgagactccatctcaaaaaaaaaaaaaaaaaaaatcaacagcggcttctaggatgattgagcagtgactcagtctctccttgaccagattctgtaactgtccagcagaaatgcttatctgatctctgtgagaacaggaagcagctcagtgggggccttccttgctaaattcttcatcaagctggtctgttatctgccctgagtcctgcaagaacatctcaagaaaaataccaaaaacatgcaagacaaatgagggtccttctttagtgtgttcttgaagcactgaggtgcctgaaagttatatatagtttctggggaaacagttttttaggaaatgtagcacagatactaactattcttccagaagagccccttcctgacgtgaaagatcttagtgtgagagagaagcatctgattcatcatggggacctatccaaccagcagcagagaccccagtgccagtgtccacctcagcagaggagacgcgggggaaatgcaaagtgtttctgttgcgaaatacttcacctagggtgactatagttagcagcaatgtattgtatatttcaaagtagctagaaggctaggggcagtatcccatgcctataatctcagcattttgggaggcccaggcaggcagatagattacttgaggtcaggagttcgagaccagcctagataacttggtgaaactccgtctgtactaaaaatacgaaaaataaaaaataaaaaattagccaggtgtggtggcctgcgcttgtagtccaagctacttgggaggctgaggcaggagaattgcttgaacatggaaggcagaggttgcagtgaactgagatcacgccactgccctccagcctgggtgacagggcaagactctctctcaaaacagaaacaaaaagaaaaaacaaagtagctagaagaggggacttgaaatgtacccaacacatagtaataccgaatattcaaggtgatggacaccacaaacaccctgattgatcaccacacattctgtgcatgtaagaaatgctcaaatgtactccataaatatgtaaaatgttttatatcaacaagaaaataccttgcctagtgtttccatccaaatgggaataaatccagggcttgatgtacacatttcacccatgagggcatgggtccctgaagccccttggccctgcctggcctggaatggcaatgagcaggccatcttgccagctgagacatgaagcccaggctgggcctctgtgccaggtcacacccctctcaggatgtgctagcgcctgcctcaggttggtttccaaagcctcatccagtaaaaccaggtctctcaaagcaattcctccaacaaaagggaattctctgcctacttcagagttttttaaagtgtgggtggtagcatgctagaactgaaagatttcagagtcagaagaaacggttcttattctaactgtaccttccacctcttggttccctcatctttagaatgggaatctgttggggtgatgagacccaacaccaggtcgcgggggcggcaagtccagtggagtcaaaggaatgagaaagagacagtttgagagagaaaatgggagcggggcgccatcgcgagtgtggaggctgcgaaggccccgagttctgggagcccacgctagttattggtgatctaacaaagaaacaggtggtgaggatgtggcggttgaaaggaaacggtgtatcaagtgaatgagaaacatatggctacttgagagaatgggagtgctagaagcaaggagccagcaagtctagcaagccctgcctcagcttctctcccaacactcagcttttctcccaacaggaatcatacaaaactcagaggctagtgaaatgttaaagcaggtggtccacaccagctgcagagtcacaaacaaaatacgtgtctgctgccatttagaaagaggacacaaactcaggcaagactgtttttcacacgatgacccatgagtggcgcctggctgggcctccccacacatagctgctgacctctgaatacaacatacacttcgggaccaggtgcagtggttcacgcctgtaatcccagcactttgggaggccaagaggaatgaatcacttgaggtcaggagtttgagaccagcctggccaacatggcgaaaccccgtctctgctaaaaatacaaaaattagtcgggcgtggtggtgggtgcctgtaatcccagccactcaggaggctgaggcatgagaatcacttgaaccgaggaggcagaggttacagtgagccgagatcgcaccactacactccagcctgggtgccagagcaagactccatttcaaataaaaataaaaataaaaataaaaatgctttaggggactcggatgaaattgaaaatgccctttttgactttgaacagacttggtgacttgttaagaaatctttgaagctttaaagttatggtaaaaataaaaatccatcttccttttcctgcataagttattcagaataggctgttttgacaagaaaggctccccagatttccagagggaagggtccaagctgccagtgttcacccagcaccaggactcatgccctgcccccaggagacctccccaggtctgcacccctcaactccgtgctgacttggtagagcaggagaccagggttcctgaggggccaaggcctccccgcaggtcctcgcctgcctagtaacatccacctccaatggacccagtctgccccagatccccccagcccaggtagaaaggagccccaggtcctcactggctccctcggtggccttctcggtgcggtgggccaggccctcggcagccagctttcccaggcctcccaacatcgtgtggcagcagacagtggtgaactaggaggctgaggactggcccaacatgcttttatagctgcctctggtgcctatctaggctctggggcaacaagccctcgccccagcccagtaggaggctggacaggtgagtcagcgagggcggcagcaggaaggggctgggcggagccaccctggcactggggtggcagcatcccctgacagcatgaagcttctataaccctgtcctagggaccccgtgaaggataggggcagggagcagggctggacaggagagatctggacatgcctcttccttgaggcagagggcctgagtgccagcccccctgagaccaaagcttcccaagcctgggtactgatatgtacctggagacaaggcctaggattccaagcctgctgctcaaggtccccagtgtggcctagtaagaggtttgggggttctatgggcctggagacctaggcagtcctttgggtcatgaacacaagtggagtgagggtgactgccctccccattcctggagaccctggctctgcagagcagtttgcggcctccatgggacagcgtggggtgttcagggtggtgccttgcccgagtcagaggggggcacagcactgggcagaagcgtagtcaccaggcgtcgctcagctgatgctcactcacccaagagtgtctgtgaggtcagcggtgccctcctatcccctggcagtcctggaggagtagacagaggcctccaccaccactcagggagatgcttctggccttagctagaatcccctagaaagcagcttccccggctcctggtgcatcgcatgaggagtggcagggctgctccctagttactcatgatggacagacgtgcctcaagccccctgccacatgctgcttcccttagtcaccagcccaacctgagcctccgtttcctcatctgtaaaatggggatagcctgccttcctggctgtgtcactaatcgtccctgagacaaagcatgcaagctcctgataaacacctgttccctccactcatcactgaggtgccctttggcagtgagctctgaccaaccggtagggtgtgccaaggagtgactgggacttgaggctgccttggagccagagggctggggaatgttacttccactggccaggagccaaggagaggtcttcccatgctcctacttctggggtgcaggcctgtggcaggggtctgaggctctctccccaatgcaggctcctggagctgctctcctgggtgtgttggggcctgattagtttactggactgtgggccctcccagcctgggactcgggagctgagaccctcttgcattcctgcatggtgtttgcgggctccagggctatggccagtccccctagggtggacagtgggtatcgtgggcagcaggacctctgggtctcaagactacggccccacacatgccattgctatctcctttgggcaggggtgaattggggcttaaacaatttagaggggccctctttatgaaaaagaatacaataatatgattcttgcacatttttcatttatatacgtatgaacttctggacccagaaggggctgtgaaagtcgggggcctggagctcaggcgggtccaggtgaccctgtcctacttttgtaacagccagagtccaggatgttttgcccagggcattgggctggcactgcagaggcctgggggatggggggacacctgggacatggctggtgggaattgttttaggaaacctcagggattctccctggacctgtcaaagccccttccctgtttcttctgaggctgtgtgttccccactcgcacaagggtcctttctatgcctgttccgctgataaatgtcatctgcctgctctagaatggcttccagaccccacagaccccctcctcatgagctcccaccctagggtactctccaccagtccccgctttcaggagctcaccagactcagacagcctgttgtcagagctcagccacacagcaggaccctggcccactgcccagcccagagccaggcccaccacagcctctggggacaactgcccttccccccaccccctccacatggtcccctgcccatgagaccctgccctgctaatttaatgcactgccttggtgtgagcactgattctaatgacaacataccatggccttctgggcaaggctgggtccagacacagatcccaaatgcctgctggggagaaggcaagaggcccggggaggcccaggaccagacatgggtcccaggccctggtgccctccctcttggccttccagctgctgctgctgtgaccagattcccgtccacccagcccagtccatgggccccagcaagccatctgtgccccacagagggcagacccctaagagtgggacccctttctagccaaagaacatgagatagccccaaatcctcctaaacatgatggatcctggtctgaggggctgggctcaggtgactcctgcagggaacttcacctgcctggatgaggtcaagtgtgaatcaggtggggcctgccctccaccaccccatcatggaagaggtccagcccacagtaggcccaagagggccgcccttggacctagggacccaagtcagcatatcctgagtcagaaggtcaagtccagcctcccctcaggcagggagaatctggctttgacaggagcagataaattctcaaggtggaatttgcccaacaaactagtttggcaagggactagctggctgaatcattgagtcaaggacagccaacgtttccaatagtaatttgccaacttagaaatgaccaattctggaaaacaacttgtttatttgaaatacttaaatacttaggctgtctcatgtctgaagcatgatgatgccttgcatgctttaaaggacagacgtcatgaatgccaagacttttgtggcggtccatcctgccagtgtcttctcccacttttgctctgtggatttgagctcacagtttgtgctgtgcccaccacctgcccaccctaacgagactcctggagacttggctggccagtcaccagaggaagaggggcccagcagcatgccagcattcacccacctgtgggtatcagtcaggctcctggtggaagccagaggacatattcgaatgggtatttgaggaaaggggctgttcacagaagtgtggacagagttaagagaaccagtaagagatgaggaatgtcctggaccagcaagagtgggagctgttatctccctgggtctaggaaaggtgtccacagatcccaaagagagctgtggctgtagaggaggatcatcaggagctgcagccatcagtagaaagatgtggccactgccaaaccagcaaggaagaatctgagcaaataaccacctctcctctctctctcccacctcctatgacatcctccactgtttgaattccactagggccagacagtgaggcaccctggtgatgcagtccaagagggagtgggcagagaggagccagtgggtatggaggggaaacagagaaacagaattccagctcactctgtgggatttctgggtctgatagaaacatggcattattattattattattattattattattattattattttgagatggagttttgctcttgttacccaggctgaagtgcagtagcatgatctcggctcactgcaacttctgcctcccgcgttcaagagatcctcctgcctcagcctcccaagtagctgggattaccggcacatgccaccacgccttgctaaattttgtatttttggtagaggtgaggtttcaccatgttgaccaggctggtcttgaactcctcacctcaggtgatccgcctgcctcggcctcccaaagggctgggattacaggcatgagccactgtgcccagcctgcagcagctaaattttacagtgtctcttttctccttctggaaactatatggaacaacaacaagactgaggaggaggagaaggaggaggaggaggaaaaagcccatcatcaacacacacatcaaactcaacttcagagaaattaggaagctgggaagccatgtaaaccaaaagcaggagacaccagcagaaccaacgcaggaagccagggaagtgcagaagaacagggcagggggcaacccaggggggaatcttcactgttgccagcaacacacactcccagcaggagaggaccctcagagtgagaacgcagagctggagaagtgaagaaggagcaggtggtgcccggggaagtccaggggtgtgggatctgagagcaccccttcccaagagaggaaggaacacttgggaaggcagggctgagtccctggaggctgtatccgggaaaggaggatggcagtagaatcttcctgaagccgagtgggttctgagaggcagaggggcagtggtacagaggtgaggctgacacttctgtgcaggaagggcaggctcctgaggaagggagccccgaatgctctccactagattcccagggagccccactccctccacagggacctcgcgctgacatctgggaaatgccattcatactggaacctccgacacactgccatgaatgtgagggtttcgtgactgatggggtaggtttctctcttccaacttaatagtataatttccatttattcctcccccagcctccctgaacattcacctcttagatagccacagtacggtgatcagaaccaggaagtccacattctcatatttaactatattaaaattatttcacaaaataaccaattttattaatttaattaaatacatttaaataatgtttaaatatatttaaataatgtttaaatatatttaaataatgtttaaatatatttaaataatttaactaatttaaaatgaacatattcgctaaacaaaagaccttattggagtttcaccactttttccactaatgtcctttttctgttcccaaattccacccaggatcacgctgcatttagttatttcttagtctctcgccattttgtaggactgcaataacagttcctcaatctttccttatctttcataaccgtgacatcttgaaccagtactgatcactatttgtcaaatgttcctcgatttgggtttgtctgatgtatttccatgattggactgaagttacacacttttggcaattacagcacaaaaatgatgtggaatccttcccagtgcattccatcagagttatggcattgatagttcttcttactgatgatgttgaacttgttcatttggttcaggtttctgctgggtttctccattgtaaagttactatctttccccctcatagggggaaagatcttaggagaaatacttggagactatgaaaattttgtattttctcaaactttaaaatttttttcaggccaggcgcagtggctcacgcctgtaatcctagcactttgggaagccgaggcgggtggatcacctgaggtcaggagttgaaaaccagcttgatcaacatggagaaaccccatacgtactaaaaatacaaaattagccaggcatggtggtgcatgcctgtaatcccagctactcaggaggctgaggaaagagaatcacttgaacctgggaggagaggctgcagtgagctgagatcgtgccattgcgctccagcctggataagaagagcaaaagtccatcacaaaaaaaaaaaaaaaaaaaaaaggccaggcgcaatggctcatacctgtaatcccagcactttgggaggccaaggtgggtggatcacctgaggtcaggagttggagaccagcctgaccaacatggagaaaccccatctatactaaaataaaatacaaaattagctgggcatggtggtgcatgcctgtaatcccagctactcgggaggctgaggcagtagaattgcttgaacacgggaggtggaggttgccgtgagccgagatcctgccattgcactccagcctggccaacaaaagcaaacctccatctcaaaaaaaaaaaaaaaacaaaaaaacaaaacacctatttgacagccgggcatggtggctcacacctgtaatcccagcactttgggaggccaaggcaggtggatcacctgaagtcaggagttcaagaccagcctggcgaacatggtgaaaccccgtctctactaaacttacaaaaattagttgggcatggtggcatgtgcctgtaagttccagctacttgagaggctgaggcaggagaatcgcttgaacccagaaggcagaggttgcagtgagccgagacggtgccattgcactccagcctgggcagcagagtgagggatctcaaaaaattataataaaaaaataataattctattttgaattgtggtaaaatatgcataaaatttactaccttaaccacttctaagtggcagtcggaacaggggttaaggagagcccttgggttgggtaatgtagagtatattcacattgccatgcaaccaatctccagaactttttcatctgacaaaaccaaaactctatatccactaagcaacttcccattttctcccttccccatgtccctggcaacccccgttctactttctgtttctattagtttgcttactcagtctggatgcttcacataagtgaaagaacacagtatttgtctttttctaactggcttatttcacttagcataatgtcctcaatgttcatccatgttgtagcatgtgttagaatttccttcctttttaaggctgaagaatattttattgtatgtatataccacattttatcaattcatctgcctatggacaattaggctgcatccatcttttgatgagtgtgaataccactgctataaatatcagtgtacaaatatttctatgagaccttgctttcaattattttggctatatacccagaagtgatattgctggatcatttggtaattctatttttaattttttgagaaactgcctgtcctgtgctgagcaggtctatataaacctacccgcaaaggccaaggaacctgagataccaaagaaagaggctgacaaatccagtttctcagaaagaaacatttaataggcgtttatgaacagaagccaagtcagggatggcaccaagataagatggtggatccctgtgccattacccccacccccccgacccagggcttctatagcataggggaagggtaatgcgggcttcggcagggatgtgtatggccagacacggtggctcacgcctgtaatcccagctctttgggaggccaaggtgggcggatcacctgaggtcaggagttccagaccagcctggccaacatggtaaaacctcatctgtactaaaaatacaaaaattagccaggcatggtggcaggcgcctgtaatcccagttactcgggaagctgaggcaggagaatcgcttgaacccaggaggtgaagtttgcagtgagctgagattgtgccactgcagtccaacctgggagacagagtgagactgtctcaaaaaataaaaaataaaaaataatatttttaaaaagataaaatagaaattgtagatgaattcttggaactgggattaatcagaatatggcagattagcctccaagatggaattgctttactctcattcaaggtttccctcattcttcactctccccatgctggtcaccttgctgtttgttcctcaaacacatatgaaatgcgtttctgtcttggcagtcatcctgctacctgtaatgtcagcactgctttctgttgtcccttcagtcaggtcattgttcaaatagctctctagacaggctcttccttatcattctacttaaaatagcccccaatcactctgtgtccctttagcctgcttcctcttcctgctatttcatactacctgaaaaaatacttgaacttcctagaacataagctcctaaaagcaagaactgggctccacctctcctctcctctaccccagcactcagaagagcaacagagtcagcatccagtgagtgttcatgaatcaagtcactgcttggcagaattcagcactgggaccacagcctcgcctgtcttcaactctttctccttctgcttttcctcctcccactctagtagccactcttctgggggcttgtcccttaaatgattagtccttaccaacctattttctgtccactttatctgtttttgagagagggtctcactctgttgcccaggctggagtgcagtggcatgtatatgggtcactgcagcctccacctcctgggctcaagtgatcttcctgcctcagcctgccatgccatgtaactggggccacaggcatgtgccaccatgtccagctaatttcttgattttttttttttttttttggtagaaatgggtctcactggcctgcagaaatatgcatgtcctcagtgtttggactgccagctgcaaggcagagccaaacccaatatggccccatcatccctggctcagctgtgctacctggccatgctggaaggggtttgattttccaggaatttgcttcacagctctttcctgtcccaagatctatgcctgatgtgtaaattcaggacgcaaaagggcacaaaaaagcaataactactaaatataaggaaaacaactctgtatacagcacatataaagaaaagcaagatatatttggggagataaaagttgtaaaggcattaagatgtgtgtttgttgagaaaaaataaatttgtgcatttaagaagttaaaaaaaaaaaaaaaagaaatgggtctcactttattgcccagtctggtcttgaactcctacactcgagcagtcctctcaacttggcctcccaaagtgctgggattacaggcatgagatactgtacctggtcttatttttttcttttcttaagatacagggtctcaacatctggcccaggctggactcaaactgctgagctcaagtaattcccccacctcagcctccgaagtagctaggactaaaggcatgaaaccaccatgcttggcttgtccaatttcattctacacactttctcggtatttaaacagctgctgttgctcttcattctgtagctctacatcagattcatgctccagtcctgtatatccaaatgatgactagaggctgccggctctgctctttcaaaggcacaatgagtgtagccggtctacaaaactctcccttttccaatccagctttccctcctgcatcacctatctctctacatctggaaccatcggcagctgccttcataaggcacctcggtctggcattcggaaaaccaccctgtcttgccagagccgcttggtcttgggtagcaaaagctgtatgcaatctaaatcaagctttcaatcatgagaaatcacattccttcttttccctttgtaatatactcgtgtgttttttttttcctttctcaataagcaaattgtaccaccatcttattctgagatgctcctttttaaaagctgtagatcacattaatggaagtgtttactgctgggaatattttccatgtgcaatgatctgtaaccctctttttcttttcttttttttttttgagacagagtctcgctctgttgcccaggctggagtgcagtggcacagtctctgctcactgcaagctttgcctcctgagttcatgccattctcctgcctcagcctcccaagtagctgggactacaggtgcccgccaccatgcccagctaattttttttttttttttgagatggagtctcgcttggttgcccaggctggagtgcagtggtgcaatctcagctcattgcaagctccgcctcctgggttcacaccattctcctgcctcagcctcccgagtagctgggactacaggtgcctgccaccacacctggctaatttttttttttttttttgtatttttagtagagacggggtttcaccatgttagccaggatggtcttgatctcctgacctcgtgatccgcctgcctcggcctcccaaagtgctgggattacaggtgtgagccaccacgcccggccatgcccagctaattttttgtattttttagtagagatggggtttcatgatgttagccaggatggtctcaatctcctgacctggtgatcagtccgcctaagcctcccaaagtgctaggattacaggtgtgagccactgcgcccagccgaactgtaaccctcttatctcaactagctgacattattacttcacatccagttcaatttataaattaagagaggtgccatgggccgggtacggtggctcacgcccgtaatcccaacactttgggaggccgaggcaggtggatcacgaggtcaggagttcgagaccatcctggctaacatggtgaaaccacgtctctactaaaaatacaaaaaattagccaggtgtggtggcaggcacctgtagtcccagctacctgagaggctgaggcaggagaatggtgtgaatccgggaggcagagcttgcagtgagcagatatcatgccactgcactccagctggggcaacagagcaaaacatcgtccaaaaaaaaaataaaaataaaaatgaaaaagaggtgccatgtgtacaaaaatcaatgcatatttatgaacttttttttcaaatatattttcacacattttatctaaatacataatacagaagcctgtgtgacttgggcaatgtggccaggagggcctgagactaacacatccaccttggcaaaaggacataaaatatgtcttatggtcagaaaaatcaacattttgtgtatttacttagtttatgaaaagtactgaaaatgctattactagctgaatttgtgatttccttttgaaattctgagttatccttatttttcccattttgtttttgcaccaaggagactgcagtcaaataaaacagatactacacgcactcgtcggggcagccgtactgcagaagcacgttgatgcactcctggctggaggcctgccgggcgtaggtcagcgctgtgttcccgtgggcatctcgggccatgacgtccaccccgtaccagatcaggagctgtgccaggaccacattccccttgcggcaggccagatggagcgccgtgcagccgtctccctccccacaggtctcgttcacctcctcacgggagccatgtgccagcagcaggatggctgtctgcaggtcctcatcagcggtggcccgcagcaggtgctggcccagggacagctcagtgcagggtagtggggccagaaagagcttctcctcatatttggaacggatccaccgttccttctcttccctcgtggactttactgagggttttgtctgcccctggctgctcccttcccagatgctgttggctaggtcattgccaatagatgacataaccttcctgagctcaactggccagtcatccagctccagagatcgcacacgggaaaggcgggtgccaagactgcggtggattcctgagcattcaatacacatgaggactcccaagttcaaactggcccacttaggattctgggtctcatagtccacacagtgggcgttcccacgcatgttttggatcgactgcagggccatggcctcgctctggctggtcagctgggacttgcttttactgctctcgcatgactgcaggctggccaggatctggctctggatggcttggacccaggcatcccgctcctcatacgtcgtggcttcaaagtgccatgtttggccagtggcagacacaatcataaagttgttggtgcttttcttctttaggtgtttctttttattggcatgaggagaggggggcgggttgagcttggggctggtggtgctggagatactggggctgaagcatatggagtcacccagcccggtgtccatgtccttggataggccattgcttttagagctggagatgggtgcacaggccgatgtggctagggatggccactttcctgggactttgatggtagatgtccgaaggtcaatctcttttttatgaatattcttcatataatcacctaagcttgaataataggtgagcacgccattggaacacagggtgacgtatttctttttccatgtcttcagccatttcccacttcgctttaagagcatgccctgtttaatggggatggctctgccgctcccgatggtgtcagcatgattctccggggctttcctctctttgtctgggtgactccctttctcagatgtaaacaggttggaccagcgcatggaccgcttgcaaacgggggtgggtgtgttggcagtgggaggaacactgaactgagggtcctcctggctggtgctgggagtcgatggaatggaggaggaatagttatttaaactcccacctccatttctgttcttcgtaatgtgcacggtggaaacctgtgtggaacagaaggaggaatggcttcaaaaattgggtagtggcttgcagggtcctatagacagcttacaattaccttttaaaaagatacattttctgggccaggcatggtggctcacacctgtaatcacagcactttgggaggccaaggtgggtggatcacgaggtcaggagttcaagaccatcctggccaacatggtgaaaccctgtctttacaaaaaaaaaaaaaaaaagaaaagaaaaaagaaaaaaaaattagctgggcatggtgtcacatgcctgtaattccagttactcgggaggctgaggcaggagaattgcttgaacagggacctgggaggcagagcctgcagtgagccaagatcgcgcgattgcactccagcctgggctacagaaagagagtccatcaaaaaaaaaaaaagatacattttctgttgtttggatagtatatttactcatactagctcactaactaaacagagctgcagatcagttcttactccagcacattctttttacaacacttaagatgactaaatgcaacatgaaatggggaagatttaaaaaaagatggctttgacttcagcatgaaacagatacaagtgtacgatgaaaatagaacctcaataaaagtgccacttaccgcaaatgagtgtaactgttcatcaggtatgctcaaagatctatctgcatctctataaaataagaaagtgcattacttcaaaaactgttaatatcttagtataatatttgttgagtaaaatacttcctcctgtgtgctttggtgtttactttaccaaagcagtttttacaaattcttctcctggatcctgacttgcagagggtttcctgacttcttctttctcagcacatcatggcctgtaccgtgaagccttttatatgataaccagtcagaaatgcccatgaatattgactctccctaacaggccatggcaataaaccaaacatattttcactcttctaaccacacattgaaacacaagaatgttctacaaagcagtagtagtaaactttaataaatgtaaatgtgattcagatttcctagcttcctttctctttagttctctgtagtatactctcatgatgtttttatgtattttctgttgtctgaatgacaaactcatctgcctttttaagaggccagtctttgaggaactttaaactttgtaaaactaatgcattgtgcctgtgtataaaccagtggttctccaaatgtgctctgtggacctctcgggatcccgaagaccccttccagaaggcctaagaggtcataactgttcttttttttttttttttttttttttttgagaccaagttttactcttgttgcccaggctggagtgcaatggtgtgatctcggctcatggcaaccttcgcctcccaggttcaagtgattctcctaccccagcctcccaagtagcagggattacaggcacctgccaccactcctggctaagttttgtatttttagtagagatgtggtttcaccatgttggccaggctggtcttgaactcctaacctcaggcgatccacttgcctcggcctccaaagtgctgggattacaggcctgagctactgtgcctggccaacactgttctgaatcatactaattaaacctgagaaagctgatgaaaaattttaaaaatttgtgaaagtaatacaaagtcattgcctgctttttcgttgacacttgccatgattgtataaaagcaaaagtaggtacaatggctggtttctcagcataaatcaaggcagtggtaccaattacattagtagtccctttcactgtcccctacaggtaaaaaacatagcctgaatttcttaagaacgtctttgatgaagcaataaaaattaatgttgttaaatcttgacatgtctctaatattctgaataagtggaaagttaatgagaagtgcttttttttttgtttttaaagaatccgtgatttaactgtgaactgaaaaatcacttttttcacagaacatcatttttatttaaaagtacaactgggccagcgcagtggctcacgcctgtaaaatcccagcactttgagaggccaaagcaggcagatggcctgagctccttcaggagttcgggaccagcctaggcaacgtaacgaaactgtgtctctatcaaacatataagaaaattagcctggcgtggtgccacacatctgtggtcccagctacacaggagcctgaggtgagaggattgcttgagctgagatcatgccaatgcactccagccaagtgacagagtgaaactcggtctaaaaaaccagttcaactatcattctcaaaaataaatgaagtgagaggttgtcacttcaagggaaatacgtatttgttcccaatgataaaatttaagctttcctgtggactttgaaaaacttgttccttctactgtaggcttggcagcttttcaatacttaaaggcgtgttaaagtaagattggtggttaaactaaaagtgatttttgacacaataaaacataagccaatatattccaagtaactaatgcatgatattataaatgcaagtatggagcaaaagatccatttactgtgcaagaaagatcaatgagtactgatggaataaatttattaatatgtaaaatgccaccgtaactaatttaagaaaccaccacttgtgaagttttgatttagtgttttaacaaatacccacaactgtctgaaaactttaaaaatacaccttctaccaactacatatttgcatgaggttaggtcatcttattgcttctttttctctttttttgagacagagtctctctctgtcacccaggctggggtgcaatggcgagatctcggctcactgcaacctccacctcccaggctcaagcgattctcctgcctcagcctcccaagtaactgggactacaggcatgcactaccatgcccagccactttttgtactttcagtagaggcgggttttaccatgttggtcgggctggtctcaaactcctgacctcaagtgatccacccacctcagcctcccaaaatgctgggattacaggtgtgaaccactgcgccccaccagcttattgctttttttgtttgtttgtttagacagagtcttgctctgtcacccaggctgcagtgcaatggcacaatctcagctctctgcaacctccgcctcccaagttcaagcggttctcctgcctcagcctccagaataggtgggactacaggtgcgtgccaccatgcccagctaagtttttgtatttttagtagagacggggtttcgccgtgttagccagaatggtctcgatctcctgaccttgtgatccgcccgcctcagcctcccaaagtgctgggattacaggcgtgagccactgtgcccagcctcatattgcttctttgaagcaaattgcaaagaaagctctagagaatccatttgtctcctattaagctcaacatgagagactttaaataatataaacaaatgacacactttttactcaactttttgttgtagaaaagttttttttcaatgaaaaacttctgttaacaatactgttctcaaggaatattttctgtttttataacctgggtcatgggttactactgacatctagttggtagaggccatgaatactgctaaactctctgcaatgcacaagacagtccttacaacaaagcattatctagcccataatatcaacagtggtaaggctgtgaaatctaaactaaaaatagattttgaaaaaatttcaattgtataattctaccacactaaatatcaatataatcaatataagcatatactctttgagattctcaatcatttaagaattatgagagtcttaaggaacaaagaaaatacaaataatttgcttcgatattttagtaggcacaatacagcttatgatgtctagagctgtgacctaacactgagcttgatatcttgcaaagtaattagctagaataacaagacaggtttctaaaaagctcacctttgtgtgatatgatgaggtatctccaaggtcacactgtggaaggaaaaaaaattcataacaatagatgttatcatttgttaggcctgaagacattttttaaaaggggggcagaggaaactctcctagcggccctgaaattcaaatcttctagttcagaacagtaccataagggcactttgttttcatttctttgttttttacaaaaatatgagaaccaaaatgcaaggaaatatgccgttagaagacgcgtttctgttggtgattacaatatataaataataacagatttccctgttatatgcttttctaccgatgaaacctttcgtcccatgcgatttattttatgtatttatttattttttgacccagagtctgtctctcttgctcagactggactgcagtggtgccatcttgactcctcacaacctccaccacccaggttcaagcgattctcacgcctcagcctcccaagaagctgggactacaagtttgcgccactatgcccagataattttttttggggggggtgggtgggtggagtttcgctcttgttgcccaggctggagtgcaatggtgtgatctcggctcaccacaacctctgcctcccgggttcaagagattctcctgcctcagcctcccaagtggctgggattacaggcatgtaccaccacgcccagctaattttgtagagtgaggctcaaaacaactgagggaaggtaaatctcaattctactaataggtctacacaatattagcactttttaaaaagcctgtaacattagcatgtgagatggatatgtctatagtgcttcaagtagttttcatctctgaaataattttaaaatcacagaatttaaagttacatgctggaaaggaccaatgaccttatgtgacatttaattcaacactcgttttacagatcagggaaacaaaccttaaaactgacttgcccaaggtcccaccaaataggagcagtttctcgtcctaaactcaaattaagcagtggctctcaaactttgctgcacattaaaatcgcctgagaagctttaatatctgcctcatcttccacatgagacattttaatttaattagtattgggtatggctttgggcatcaaggttcttggtaaacgtttcccaggtgatttcaatcagcagcaaagtttggaatgattgagctggggtgaaaatcagaatcttctgggatgcttttcttcacagaaagatgcctcacatccatcctgattttcctaaaaggcttctcagtgcctacagatagagggaaagtggagatgggaagatacatgtatttgcagacttgcattttgaaaaaaaccttgcataagtgatctcagcgagtgccacctatcccactgacaacagtgcactactgattcatgataaaacatttttcaaaatatcttcttgaagccaatttgccctattaatttgttcaataactttatttcaccaatagtgaatacaccaaatgattatttctcaaacttgctggtggcaaattaaaacttactatactctcaaaagtagacttctaaaaagtagaataatgaggaaaaaagcacgaaattagtttcagcaaaattaatcttcaaagctgcttttgaattatatgctaacttatcaaaatctttggaactcagaagaagccagggactctagtcaaagtaatttttgtgtatgtgtgctcaaagatttaagagacttggctgactacagacatttagtgattactcaataggtcccaaagctcaggacttgagacagagtttgagtccagtttttgttcgaaacacaatttcctctcaactattgttaaaagggagggaggaaagtgacattattatgagtgtaaacttgccacttttaattgaagtaaaagttattgacaattgaattagctaaaaaggctagtgcatctgaaacaaaattgtttataagctagttatgtttacagaatgaaaagttaaattaaagataaagacattaatattctaaattaggactttccaaactgtgttctaaaaatcaagactaataacccaaggagatgagaataatgtacactggacggcccctgtggagctggtggtggtgttggttgttgttccttttaaaataaacttcatctcagggtgctctcaaagcgcatctttgtggcccacgaggtgctcatgcacaatgggagaaattcaaatgcagatacactgtggtgccagaagaagaaaagctgttccttcttccaaggataatgtccaaagtagtgcacactgatttgggcctatgatgcattgaaaaactaagtttccacaaaaaacattcaataaagggaacctatccttctcactgtgttcaacattgtctaaaggcataaaggcatcaaaaagatacactgtttctgggtttgcttctttgctaactgatttttccttccaccacgacgtctaagattaaaagagaaactgatacttaatattgagaatctggatatcaatatatggttgactccaatttcttaagctgattgctgaagaggacaaccaaatggctgaaataatttccgaataaaggaatctgtccctcggcagcatagttgtactcacgatattattgtcattgtaagataatgctggctggctgtgctgtcatcaaggaatattgtcgaacacgagctgtattgttgactgaaacgctcagtagatacctgaaggggaagggaagtgtaagtcaaatttatcaaagtgtatttttttctcagttaaaatgtcaaatgacaaagcactaagatatgtcttacactccatgaactgcctgagtgtggtatcatgtgcactctatagaaaacccattggaggctctcaacttccagagatgatgtttaagatatgggttataaaatgctgcccttaatatggtacctgtcatcaaacctaacaaggattttatgaattaccgttaaaaataatgggaaaagtcggcttcgccgggcgcggtggctcacacctgtaatcctagcactttgggaggtggaggcgggcagatcacgaggtcaagagatcgagaccatcctggctaacatggtgaaaccccgtctctactaaaaatacaaaaaattagccgggcgtggtagcaggcccctgtagtcccagctactcgagaggctgaaacaggagaatggggtgaacccaggaggcagagcttacagtgagccgagttcgcgccactgcactccaggccgggagacaaagtgagactccgtctcaaaaaaaaaaaaaaaaaagaaagaaaagtttaaaatgagatttcatatttttttctacagcaataaaaagcagccaagaatttctattaattaattaattaatttatttatttatttatttatttttgagacggagtctcgctctgtagcccaggctggagtgcagtggcgcgatctcggctcactgcaagctccgcctcccgggttcacgccattctcctgactcagcctcctgagtagctgggactacaggcgcccgccaccatgcccggctaactttttgtatttttagtagagacggggtttcaccgtgttagccaggatggcctcgatctcctcacctcgcgatctgcctgcctcagcctcccaaagtactgggattacaggcgtgagccacggcgcccagcccttctattatttatttactacgataaaatgtagtgtattaaataatcctgctacaagagcattttattgcagtgaatacaagactaatgcatttactaaattactaatcctaaatgtattatttcaggtgatattgttacaaaagaagtgcttcagattcaggggctctgtgtgccagggctgctaggccaccaacaagtgaggaagccataggtttctctagtcctattttcttatgtggaggataaaaagagtatcacttaaatattctctcacaccctaaaaacaaatgacaacttaaaaaatctaactttcacttcatgtttaaataagactgccaagacatgactcaaatgagactctcggagaatactttgcattcacttcaaaacttgatcaattgcattctataaatcatctgacctgcacctagccattttcctgctctacccctgctctctgcctagaatactgcttttctctttccttgcttcagcaagctcgactccatctaccctcttggatctctttgtcggcagccacaccaaaaaatgtatttttatacactaattagttgaattcaccactgcttacaagatgctaattcctgcagagtattcccctcatgagaaagtatgcctctccataagagtaagggagggcccttactcttcctacctccagctgctgagcatagaattttgagtaaatccaaaacttcgacaagtgtttgacaattcagttatcatttggaaggtaagtcttactacatttaattacagcaaaaacactactaacagtttactctttataggtattatttaaggtagtcacaaaatagaaacaaataatctaacgtcagtcagcataaatgagagtatgaaattttacaatatttaacaagaaatggaaggggttacttagtagttttaaggtttaatgacaaaaactagaaaataatcgtacctagtaatttagtaagtcaaaaccaaagccttaccatcaaaggtgcagtacccattggatgcggatgcccacgcactgacttctgctgtacctgctgcctctcattttaacccattaaaaatactaaagttgttttccttgtagacatctttcacctccttggttaggtctattccgaagtattttattttattttagtttatttttgcagctatcagaaaaggggttgagttcttggtttgattctaagcttggtcgcttctggggtataacagagctactgatttgtgtacattaattttgtctcctgaaactttgctgaattcatttatcggttctaggagctttttggaggagtctttagggtttcctaggtatatgatcatatcatcatcaaacagcaacagtttgacttcctctttactgatctgcatgccttttattgttttctcttgtgtgattgctctggctaggccttccagtagtatgttgaatacaagtggtgagagtgggcatccttgtcttgttccagttctcggggggaatgctttcaacttttccccctttcagtattatgttggttgtgggtttgtcatagatggcttttattacattgagctatgacccttgtatgctgattttgctgagggttttaatcataaaaggatgctgcattttgtcaaatgctttctctgcatctgttaagatgatcatgtgattttttgtttttaattctgtttatgtggtgtatcacatttattgacttgtgtatgttaatccatccctgcatccctggtatgaaacccatttgatcatggtggattatctttttttttttttttgagatggagtctcgctctgttgcccaggctggagtatgcagtgtggtgatcttggctcactgcaacctctgcctccgaggttcaagcgattctcctgcctcagccaccagagtagatgggattacaggtgagcaccaccacgcccggctaacttttgtatttttagtagagatggggtttcaccatgttggcctggctggtctcgaactcctgacctcatgatccgtccgccttagcctcccaaagtgctgggattacaggtgtgagccaccgtgcctggccagattatctttttgatatgccgttgggaactacaaaacattgctgaatgaagtcatggacacaaacaaatggaaagacaccccatgctcatgaatgggtagaatgaatattgtgaaaatgaccatactgccaaaagcaatctataaattcaatgcaactcccatcaaaataccaccatccttcttcacagaactagaaaaaacaatcctgaaatttatatggaccaaacaagaactggcatagccaaaacaaaactaagcaaaaacaacaaatctggaggcatgacattacctgatttcaaactatactataaggccatagtcgccaaaatagcacggtactgatataaaaataggcacatacaccaatggaacagaatagagaacctagaaataaactcaaatacctatagccaactgattttcaacaaagccacctaaaacataaagtgaagaaagtaaaccctattcaacaaatggtgctgggataattggcaagccacatgcgggagaatgaaactggatcctcaactctcatcttacacaaaaatcaactcaagatggatcaaggacataaatctatgacctgaaaccataaaagttctagaagataacattggaaaaacccgtctagacactggcttaggcaaagacttcatgaccaagaacacaaaagcaaatgcaacagaaacaaataggtgagactcaactaaagagcttctgcacaggaagaggaacaatcagcagagtatacagacaaccacagagtgggaggaaatcttcacagtctatacatctgacaaagggctattatccagaatctatgaggaactcaaacaaattacaattacaaaaatatggaaccagcccaaatgcccatcaatcaatgagcggataaagaaactgtgatatacatacatatatatatatgaggaataccacctcagccataataaggaataaattaatggcattcccagcaacctcgatggaagtaagactattattctaagtgaaataactcggcatggaaaaccaaatatcatgttctctttcagatgtgggagctaagctatgaggatgcaaagccataagaatgatacaatggactttggggacttgggggaaaggctgggaggagggtgagggataaaagactacaaattgggttcagcggatactgctcaggtgatgggtgcacctaaatctcacaaatcatcactaaagaacttagtcatgtcaccaaatgccacctgttcccccagaaacctatggaaataataaataaataaataaagtacagcatttttctcagcaaacataaaataaaacaaagactaaagtttatatttttcactctccttttgggcaggacaaattttatatatgtttttaaagaattagtaacttttttcctttttccgagacagggtctccctttgttgcccaggctggagtgcagtggtgcaattatagttaactgcagcctcaaactcctgagctcaagcgatcctctgcctcagcctcctgagtaggtaatatgaaaggcgcataccaccaggcctggctaatttgttatttaacctttttgtagacatgaggtcttgctatgttgaccaggctaaaaatgaacaaatcttaattaacttaaatatttctaacactttgggcattcaggaaaacagctccatatatgttgtgaagtaatgggaagtatatggcagtggataaactttgaatgaaaatattaaacaaggccttaggagaaaagtgtaatatgcttattatacatacattaatttaaaaagttctctgccttaatatcattaattatactcaaattagactttgatttaaacataggtcctaaatttggattaaatataatagattgaccacaaatttatttcatctccctccggaaacctcattagtcataaaataaaggttacacccatgaccagcacagaaggttgacagagataatttttaataaatgctgagacataaaagtagataaaggagtggtaaataacacagaaacacaactttggtgcctacagaaagtgactggaacagaagcaagccagtttgtcttgcagaactaaaggcaggttgtgaacttacaggcaaatggcactttggaaagcagggtaaaatgtaaaaaaaaaaagccagcaaggtcagttgcaaatctctaactagagcctcaagtccacctgtccttccatctgacaagaaacttagatgtgtgttctctggatatatcaaacctgagaatttctggctcagagacaccatggcttaaacctgagatataaagaaaactgtacaccaaaaatggaactccaactttctgcgctaactctgcttttactttccaggcctgcttttactttccaggcagaaaattgggagatccttctcagaagaaactgaaatgtcttcaataaagatccccaaataatacactgaggtctcccaaatgaaaagctagtcaggcttctaaggcctcacactgagtgctatcagttaacagaaatcctgcttccaaataaagcaggccagggaccaccacacattggagggaagcctccaagaaaagagatcaaaacaatagaaaaaaggaattgataggaccagtcaaaatcaggagcaaaacttaaaaaaaaaaccttaaaacactctcaaaaaatataaaattcaatagaaatagtagaggataaagtcacagaatatcccagaactagaataaaaagacaaactgaaaaaaatagaaggggaaaaattaaaaatcaatgcaggtgtactggtctaagcagcctagcatctgaataacaagactatcagtaaaaaagtaacagagaaaataaaaaaaaattctcaagaagagatagtctgcaggtttagtagcctcaataaaatgaaaagatccccaacaagctgttataaaatttcagaaccttagagagagagattctaaaaagcttccgcagataactaaaacctggttgtaaataacgtatcacacactggcaatagattcaagaacaacactgtaataagagcacaactgcctctgcctctgcctcctctgcctcctctgtctcctctgcctctgctgcctctgcctctgccgcctccgcctccgcctccgcctctccccacagtctccctctgatgcccagccgaagctggaccgtactgctgccatctcggctcactgcaacctccctgcctgattctcctgcttcagcctgccgagtgcctgcgattgcaggcgcgcgccgccacgcctgactggtgttcgtatttttttggtggagacggggtttcgctctgttggccgggctggtctccagctcctaactgagagtgatccgccagcctcggcctcccgaggtgccgggattgcagacggagtctcgttcactcagtgctcaatggtgcccaggctggagtgcagtggcgtgatctcggctcgctacaacctccaccttccagcagcctgccttggcctcccaaagtgctgagattgcagcctctgcccagccgccaccccgtctgggaagtgaggagcgtctctgcctggccgccccatcgtctgggatgtgaggagcccctctgcctggctgcccagtctggaaagtgaggagcgtctctgcccggccgccatcccaactaggaagtgaggagcgcctcttcccggccgccatcccatctaggaagtgaggagagtctctgcccggccacccatcatctgagatgtggggagcgcctctgccctgccgccccgtccaggatgtgaggagcgtctctgcccggccgccccgtctgagaagtgaggagaccctctgcctggcaaccgccccgtctgagaagtgaggagcccctccgcctggcagcgcccccgtctgagaagtgaggagcccctccgcccggcagccaccctgtctgggaagtgaggagcgtctccgcctggcagccaccccatccaggagggaggtggggggggtcagccccccgcccggccagccgccccgtccgggaggtgaggggcgcctctgcccggccgcccctactgggaagtgaggagcccctctgcccggccagccgccccgtctgggagggaggtggggggtcagccccccgcctggccagccgccctgtccgggaggtgaggggcccctctgcctggccgcccctactgggaagtgaggagcccctcttcccggccaccaccccgtctgggaggtgtacccatcagctcattgagaacgggccatgatgacaatggcggttttgtggaatagaaagtggggaaaggtagggaaaagattgagaaatcggatggttgccgtgtctgtgtagaaagaggtagacatgggagacttttcattttgttctgtactaagaaaagttcttctgccttgggatcctgttgatctgtgaccttacccccaaccctgtgctctctgaaacatgtgctgtatccactcagggttgaatggattaagggcggtgccaagatgtgctttgttaaacagatgcttgaaggcagcatgctccttaagagtcatcaccactccctaatctgaagtacccagggacacaaacactgcggaaggccgcagggtcctctgcctaggaaaaccagagacctttgttcacttgtttatctgctgaccttccctccactattgtcctgtgaccctgccaaatccccctctgcgagaaacacccaagaatgatcaattaaaaaaaaaaaaaaaaaaagagcacaactgcaaaatgtcttcagaaccataaaatttagattcaacctagaggtgtactctctatcaaagaggagggattttaacatctccacccaggaaaatgtgttcaagtacaactagagaccataacaggacagaaggaaacacagaatctaggacacaggcgatcccacacaagacagcagttacgtgagatcccaaaagactttaaggagttagcccagaaaagcagacatcaagcatatctagggaaacccacgctatattgaactaggatgacaaaaggccaaagaaagttgccccccaaacaaacataaaaagcaacaggtgtgttttcgcagatggaaaatatctttgaaaggcatgtgataaatgctacaatacttgggggaaaaacagctgttagaaaacaggcaaatgaatatagtcagaaaattagcttcatgctaaaaaataatggatgtgaaagcaaacagagcacccagaggctacttaacgatatttggatagataaactaacgtaggctaggaaaaaagaagatccagaagaattgcagaagtgctcagatttcagaactgtttcagagacaggatgaaggacatgtaatgcagaggcacagtgaaaacaccatatgacttagcagtgaataatatttgcagagtcataatcatgtaaatattactgatttaattaaaaagtgtgctacaattggaagaaacacagggagaaacataagatcatggtgtagcggggaaggtatgcttttacctgctgtgatagaaagtcaatagacagtgctggcaattaacttagctattctatttttgttctttcattaaaaataagattaaatatttaaggcacttttttttttttttttttgagacggagtttcgctctgttgcccaggctggagtgcaatggcgcgatcttggctcactgcaacctccgcctcctgggttcaagtgattctcctgcctcagcctcctgaacagctgagattacaggcatgcaccaccacgcccggctacttttgtatttttagtagatacagaatttcaccatgttggtcagggtcgtctcaaactcctgacctcagatgatcagcctgcctcggcctcctaaagtgctgtgattatagacgttagccaccatgcccagccttaaggcagatcttttgaaccagactattgaaatttaacttaaatgtcagaaatctttaaaaggtggacacgctaagctaaacacttttctggataaatttaatactcaggaaaatagaagagatttagaaaatccacaaaaagaggtccatgctaccaccaccaggtccacattgtaatttaaagaaatcaagagagacatccttttatgtcaaactatcaatttcttaactatttgagtgtttacttacatggtttgtacagttgcttcttcttatttctacaactaagaataaaaaaaaaaactggtcacttctgatacaaataccataaaataaaagtagttgttaacatcttactgattactcctatgtaaaatgagacaaaattccatttaaaaaaataattttcaataatttataatttaaattatctggcatgattaatttcataagtcaaatctaaaaacttagtttttcatttagtttactttttgtttctattacatacaaatgaaagaatcctcatgtacaaaagaaaagggcaaaaaaattaggccagatgaaaaatttagctaataaaaagtttaactgttgcatatatgagccatgatccattagtattctctaattctgcatttacacatagcttactttaattatcagactctaagagctaacaactctaacaactacttcctgaccagacacctatctctagatgcaacataatccctgtaagcatcttgaaccacacttagtggttatctactaatatgtcactaaaaacaaaacaaaattaaaaaacggtctttacacaactggaaagtaacctatcttaaatttttttttttttttttttttttttttgagatagagtctcactctgtcacctaggctcgagtgcagtggcgggatctcagctcactgcaacctctgcctcctaggttcaagcaattcttcagccttagcctcctgactagctgggactacaggcacgtgccaccatgcctagctaatttttttttgtatttttagtagagacagggttacactgtgttagccaggatggtcttgatctcctaacctcgtgatccacccacctcagcctcccaaagagctgggattacaggtgtaagccacagagcctggcctaaattttgatgttaaaatgagtatacaaacctaattggacatggtgtctgcagcacaaaaaatcattttttttccctaaaaagaggccagaataataaaagccccaagagggacttgggccatgctttgtttcccacactgcctctgcctttgatgctggaagggccttgtaggcaaaagttcctaccactgaagagtgagggacatggaatagcttttcttttactgcttccatgctctctaggtgtgagaagcccatggctccggaaggaactgggaaatacaattctcatatgttttggatatgttgcccctccaagtctcatgttaacatgtgacccttaatgttggagatagggcctagtgggaggtgtttgggtaatggcagtggattccttatgaatggcttggtcccatccccatggtaaaaagcaaattcttattatggtaatttaaaagactgtggtactggccaggtgcggtggctgaagcctgtaatgctagcactttgggaggctgaagcgggtagatcacttgaggtcaggagtttcagaccagcctggccaacatgggtgaaaccctgtctctaccaaaaatacagaaattagccaggtgttattgtgcccacctatagtcccaactactcgggaggctgaggcaggagaattgcttgaacctgggagatggaggttgtagtgagccaagatcatgccactgcactccagcctgggcaacagagtgagactccatttcaaaaaaaaaaaaaaaaagagtgtggtaccttcccccttcccctctctcctccctctttcactgtgtggaaccacctgcttcccctttgccttttatcatgattgtaagtttgctgaggccctcaccagaagtaggtgttaaagccatgtttgtacagcctgaaaatctttgagccaattaaacctctttttgttataaattacccagccttaggtatctctttatagtaatgtaaaaaatgaagacaaattctaaccagaaataactgactcaagatgggcaaagtctactcaaactataaaaacaaaggttacaaactcccgtgttttactgtgctgcattacttcgcatattattatagaaccctcacttgtattcttgctgtttaagtcaactggaaaacttggctgtgtatggcttgttggcaaataaatgaggatttaacataacattaagggaaataagcaggagtagggcatgtttaaatttacattacatcaaatgaaaaagttaataacctaaaacttttgagtagcataaacttggatgtggtaaatgaatgtggtcagaggtctgcgtaagaggaggcccaaatcacagattcaatccctgatgataaacaactatgttttttaatttgtttaaatgaaaaccaagctgaagcctaagttctatcattcatctttaaagtgtactttttggagcaagggaaaagggattataaataaagataaatccattaattataaataaagataaatccaaaaattataaagagaaatccatgactcctccatcacatgacaaattaattgtgttgataaaaagatggcaaaatgtataaacaaaaaggttacacgttttcactaacatcataacaactaaaggaaagtatatcacatattaaaataagacaagtgaacatgtgaaagggtgaaaaatttaaaccaatatgagtttttctaaatactttctataacctgatcaaacaagagcttttattctttctcttggcggaaaaaacaatgttgtctcaccatctgtttgagagttcctctggaatattgtgcttgcctctggattggcagaagggttaaactccaaagctatatgcatagaggaagaaaagaaaaaaagatgtaatcattgataaaaatttatcaactcgtttattcaactgctgcatttaggctatttcactatctctactttgattcttatacattgaaatgaatgtatagacataagatagagccaggcaagatggcacatgcttgtagtcccagctactcaggaggctgagatgggaaaatcacttgaacccaggtcaggaagttgaggccagcacgagtaacacaatgacaccctcctttatttaaaaaaaaaaaaaaaatgaagaggtaaattttggctttgagttgtgtaaaatcaactttgcataaaataaatcaagatggcagtaagttttaaaagacaggtctattttacaggcaaaatataagatgtattctagagtttttaaaatttttaaaaagtaaattcatcatatctgtcacttccatttcattctgaggacacagaaccttagttctcttgagtagctgtcttccatagtcatgtgatatctctaagttttcatttcttcattagcaatacatagggagaacatacacaggccttatttgtattggaaagggccaagtgagactacataaactgtgttgtaatcctaaagaatgacaataaagagccatttttgggctctcatccaacactacccatctactaactggtgtgtaacatccatcaggctttcctaacatcaccaagcagagtataagtttacacaagtacttatgtgctttgtgtataaaggtacaatcaattaattcacataatacatttgtttattctaaagcaatccttaaatatcttgaaatgtgaagatagtacttccaagttacaaagtcacactcataatgagtcttaattatcctacctctttaaaaattaagagcccaaccaaagtttaaatagaagagctataagacatttcctctacagtaatgaaatctctggcatttaaatgaaaccaataagccaactggatttaatatgtttatgatgcaatgttttctattttgaaaatttcagtttttattcaagaaccatattattacccagaattacttttacttagattcatctctttgcaaaattttagaggcaaaccaactaattgttttctcttttctaccagctcccatcccctgcctctgccagcagtgtagagactaaaaaactccaactttctttccttttttttttttgtgagacggagtctcgctctgtcacccaggctggagtgcattggcgtgatctctgctcactgcaacctccacctcccaggtccaggcaattctcctgcctcagccttgtgagtaggtggaactacagtcatgcgccactacacccagctaatttttgtattttttttttagtagagacagcgtttcaccatgttggccaggctggtctcgaactcctgacctcaggtgatctgcctgccacggcctcccaaagtgctgggattacaggcgtgagccaccaagcccagccaaaactgtaactttcttatctttgaacaagatgctattgtcaggaggggaagggacaaagggggagccacggcaacaaacactcttacagggaaggtctgacattttaacctgcaatctttatattacatattaaaagtctacattgacatttcatgtcttttgaaagtgttgaccatgaaccaatccccacctctcttttagaacaaggaggtaaataaagtctgttaagtcaccagcataaatctggagacacattttctgttaaagtaagaattttaaagtaatcagagcctcataggtaaactcctttgagaaaccccaaacacacacacacaaccatttttctgcagccccggctgtgacatttcacacctttcacaattattttaagcactcttttttctttttccttctgtgttcaaattacagttagaagaaactaagcagcttctatcaaggtgacttaaagcagcccattaagaataccatatagcctctcccgtggcaacctccattctgattttaaataagaaacccccaaatatttgaataggaactgtcctgagatttggctactttaacaaaggaaacaattaggcacttacctggttccttcacttaggtaccatctggataggtacaaagaaaaaataagatgggtactgaaaagttgggatatttgagtttttattgagaaaaggaagagaatagctcaaagaagcctaaacaaagtcccacaggataataaacagagctacagacactgttgtctcaccatctgtttgagagttcctctggaatattgtgcttgcctctggattggcagaaaggctaaactccaaagctatatgtatagagggagaaaagaaaaaagatgtaatcatttataaaaatttatcaactcatttattcaactgctgcttatttgacaagagccataaataaatggtcccatgccagcctgggagaatgagatgagagagcaagaactgggcgattgggaggggaggcgaaaagaaactgactggactcggtgaggaaagactaaggggtgggaattcaaggcagagccagcttttgttcctggccagcccccgggaaagctggctacaagcagaaaggagctcaaagtgggggatgccgtaaagggaaccttggggacagcagcagccagaggcaaaccgagggtagatggcacctatcacctccttaccttcaggcatctcctggtcacgaatgtggtgcatgtggaggtcctcaccaacttcaacggtcacctcagcaggctgcacagcagcagccatgggcgctcctgccatcctgtccccagctcctgcctcatagatctcagattcagagggacacaccgacccctgttgctggtcaaactcgaggctgacgctagggtgcacacaacaggtcagtatgttccccatggggcgcctctactgtctgccaccacctgtgcctctgctcacagctttggccacacactcccactgtcctaggccgaggctatgctgcacttgcagagatggtcttcccgctcctcgcctgcccacctcacagcgcggccccgggcaccatccctggccccggccccggccccggctagggctgcgggtcaaggcccacaccctgctgcctcccctgagttgacttgtctgggagggtgaagaccagctggcttatttaataggttgtgaacccaacaagcgctgagagacacaacaactgcctgaagagagaacagacggagctcctcctccttctgtagtcacctacagactgaagcccactggccccaggtgggagcccaggcatgtggcacagaatgccccaccccacacttcacaatgccctccccgacacctcacagtgccccaccctgcctgccacccctccccaacagctcagaatgcccctgccttggctgccccaccctgtggcttatgatgctgctgctctcctggcccctcgtgcagtgccagtgggactaaggttttcattcatcaccaacttcctgagattttagtcctaagaaaagcacagggtagttcattgcttgaagccatcttcctctatgagttctatacaaagcctcagtagagtgggtcccattagcaaccaagttgaacaacttttatttgctgactgaatatagatacacctgaattgttgactgcttttgtaactaaacactcctctcctgtcttccaacgagtggtcatttttgtccgcaacgtgaccacagcaatccctgcggccctagctctactctcaataaagagttatggctgtgtgttttgaatgacaccttaggacccatcctgcctccacctccttctccataaaatagaaacctaacttgtccctccaagctctgaaatgctgaaacttaccaactcccttttctccccgctatttcttccttccatggcagggactttcagattttctttcttttactaacaaggcactaagcatgattttctcatacagaatcgagagccataaagtggcttaccacagtcctatttcaataaagatgaatacttgacatctggcaagtagtgtgtgcctgacagtgtccccactgtgctatgctcatttaaccctcagaaacaatctcatgttacagattttacagaagttgttgagacggagaaggtaagtaacctccccaaggtcacatgactgctaagggtggggccctggtttgatcccaggtagtctgaattccccaattgcttaagcatgattatcagaaagtatagcaatctgttttcacactgatataaagaaatacctgaggttgggtaatttttaaagggaagaggtttaattgactcagtttcacatggctggggaggcctcaggaaacttacaatcatggcagaagggcaggtccgacttacatggtggccgcacagagagtggcaacatgtgaaggagcaactgtcaaacatgtataaaaccatcagatctcagctgggcatggtggctcacacttgtaaccctagtactttgggaggccaaggcaggtggatcaactgaggtcaggagtttgagaccagcctagctaatgtagtgaaatcctgtctctactaaaaatacaaaaattagctgggtgtggtggtgcatgcctgtaatcccagctactcaggaggctgaggcaggagaattactggaactcaagaggcagagactgcagtgagccaagatcgtgccatggcactcctgcctggacaacagagcaagactccatcctaaaaaacaaaacaaaacaaaaccctataagatctcatgaggacttactgaatatcacaagaacagcatgaggataactgcccccgtgatctgatcacctccccctaggcccctccctcaacacatcaggattatggggattataattcatgatgagatttgggtggggacatggcaaaaccacatcagaaagtaaaggtagaagtcaagcttggatgggaaatgacattgtagattattattattattattattattttgagatgaagttttgctcttgttgcccagtgaaattgtttctctaatttcattttcagattgtgtcttgtagatgtatagaaatacaattgataaatgattctggctattaacgttttatgcttcaaccttgctgaacactattttttttttttttttttttgagacggagtttcgctcctgttgcccaggctggagtgcaatggcgtgatcttggctcactgcaacctccgcctcccgggctcaagcgattctcctgcgtcagcctcccaagtagctgggattgcaggcatgcgtcaccatgcccggctaattttgtatttttagtagagacggggtttctccatgttggtcatggcctgcctcagcctcccaaagtgctaggactacaggcatgagccaccgtgcccagccagattcgtatatttttaaaagaattttttttacttttttttttttttttttgagacagagtctcactctgttgcccaggcagtggcacaatcattgcccactgcaacctccacctcctgggtccaagtgattctcattcaagtgcctaagcctcccaagtagctgagattacaggatcccgcccccatgctcagctaatgtttgtatttttagtagagatggggtttcaccatgttgctcaggttgatctcgaactcctgacctcaggtgatccacctgccttggcctcccaaagtgctgggattgcaggcatgagccaccactcccgaacagaacaacatttttttgatgtggattttaaaatgcctccccttctttcaacattgattaagtcccttctacatgccaggcactgtatgtgtgaaatagtcccaactctcaatgagtgtaggcagatacacaaacaaaggcttaaggaggtcagttttctgagaccatactgctggatagtatatgaacctgggatacaaatccacctctatttgacctcaaatttgatgctggggtggttttaattttattctgggaatttcagtcattgaaccataaaaaggtgaaaagtctctgtcagatgtgtgtgtagtggtctgtataataaggactgaaggaagcaaccaaaccaattaagagactttctctaaaggcagagtaatgctaagggcagtggcagtgacaaaagtggaggaaaaaatctgtgatcatttgggagacagaataggaagtgcttggtcatgagatgtgaaagaagaggggaagtagaaggaaaacagagctgctcaggctctgctggggaagactgggtatgtagcagtgccttcctcctggccgagaatgtaggaagagaaataggtaaggaggaaaagatagttttttactctcagtgtcacattaaaatggaactctctggtcaaaagttgaatataaatctctgtaggctaagtccatttgtgacatcccaacatatgttttcaaaaataacatactaaatcaagccattaagtgtaactggggaaatttcctaaaatttacatgctaaaaaatcaccatttttcatttattagtttcatggagcaactttgaatctatggttacagcaagtgagacaccttgtataaaataaaactaatacatgaaaaaaaaacatttaaaattctattgttctcagagaatggagaaagcaattgaagccatgggcgtggaggtgactgccttgagaagttgtgtatagtaaggagaactgggaagaaagaagacctggagaatagggtgatttacacggcattaagtgaagcttgcaaaagtgagcactgagaatcaagagacctgcgtatgaatcaggaatggctgctcctatgagttgttagaaaggagatgatgccttcttttcatatctataacagcagcacctagcacagtgcctgttcaaagtagtgaactggaggtgagaaaacaatcacacaaactcagggcttgtcttcccaagtatttggctgagaagagagatgtagtattaaagggagatatgtggtaaaggaagacttttattccaagattcaacaaaagcgtgagtatacttctatgttaaagggaaagagccaacagagaaaacacatttttgaggttagaagagaaggaagaactaatgcagaagggccccaaaaggcacaggtgcatgcaatccggatcagggacagattagctttggactcctacaaaagcaagaagggagaaaggaccatgtgactctagagatatttctggtaaaggaaaggtttaggaaaagatcttttgatgacctttattttaacagactttttttttttttttttttttgagatggagtcttgctctgtcacccaggctggagtgcagtggcacgatctcggctcactgcaacctctgcctcctgagttcatgtcattctcctgcctcagcctcctgattagctgggactacaggcacccgttaccatgtccggctaattttttgtatttttagtagagacggggtttcactgtgttagccaggatgttctcggtctcttgacttcgtgatctgcccacctcggcctcccaaagtctgggattacaggcgtgagccactgcacccggctagactttaaaaaaaaaaaaactactgtgggaaaaaggatattatgtatagaaaagtctacacttcttgatacaactaactaaaaaaagcctgatacactaaacaaaacccaaataatgtcttccctaaaagtgggtaacttgaaaagcaattcaagcaaaaatcaaggagttcaattataaatatcaacaaagtgaaagatgggtttaatttttcccacaaaaagttaaaagaaataacagcagctttagaggaagaggaaaaaatgagaaaattatatgcagttgcaaaatgtgtgaatatttacaaactctaacatataactacaaaacggaccagaagaatcattatcataggaagcaaagggtcatttcaaaaatcagaggagggatgattcatatttaatttaattctgtggaaaaaatttaagtaacgtttgaggacaaaaataggtgatgtgttgaaatgcgggaaaccacagtggaaggaaaaagaattcaagaaagctcagtttcagtaaccagtatccagtaaaaatcctcaggacctagaggctacaatctacattaatagtgtctgaagacctagaaatgtcattaaataccattttggataattcttgtagacttgagatgatgtctatttaaagttacaaaatagtgcccatatttctgtattcattacagaaaacaattggatatggaaaagaaactaacatgctatgccacaatctctaaagaaagattagggaagtttcagcttaaagcaagaataatcacaataaagttttacaaccctttgcaagcatatatgaaaaacatacaaaaagtttgtaatgatcttttcttaagctaagagaacagaaaaaatgagaaaaattaaattataaaatgaaactttggtttagaggtaagaaacatttgatgacagtcaagagatcagggttgtacagtgtattatgtgaatgttgtgactcattggtttcatcttggatatcataacttgacattttgtaaaagtgatttttcatgggagttttttcaggtgccctataaagtcctgtcccatgagaagcgaataatagtcttccacattcttgagatatcttaatgaatagcatcttctacagtcttccattgttttgaccttggagagacactcattagtgactgttaaggtacctgagttattaggtgcctgtagactatgcccagtgatatgtgcattaggtacatgctccctagctgtgctgacactgactgaagctgtgaggtttcacaatgacatgtcagccaaatacatatgctcagatttaccatttatcaagaggtgttcacactatcaattgtgcaattatcattctacacacaggagtgataaacggagtaaaaaaccacagccatggatcgggagaccaaggtacctccagaggagtccagtgggtccagaagccctttggatgttggtcagaggctcctcttgggcagagatcacagcagcagccaacaggtctggagaagtccttagagttctcatggacaaagtttgtgaaggcatcttagacaagatcttgtctttgctggttttatgatcctctgcagatgggtctattctcattatctcagccacctttcacttcctatcagttcagttcaggtctctcatgatcccaggcagcagtagttgttatcatgtgagttcattcatatatgtttatctctttggggatggggggacaacttcactgtggacttaattctactggagatgagtgaccccattttaagacaataggatcacaaattattatcacatatcatcagggcagacaatagctacaacctggggctgaaagcaggtaactccatttattctgcaaacattctgtcttgattatggtgccagttgctgtgagggatttcctttccaccacctgtttttcacaaggtttgagtctgaactgttaacattctactgatttctgggtgaagggactgactgcaccatcctagcctgtcagagcacttgccccaatacttccactttaagagttttccaccttgtccagaactacagtccattaatcccctcattttctctcttaagagaataaacaggccaggtgcggtggctcacgcctgtaatcccagcactttgggaggctgaggcgggtggatcatctgaggtcaggagttcgagaccagctttgcctacatagtgaaacctcgtctctactaaaaaaaaaatcacaaaaattagcagggcgtggtggcaggcacctgtaaccccagctacttgggaggctgaggcaggagaatcccttgaacccggcaggcggaggttgcagtgagccaagactgtgccacagaactccagcctgggtgacagagtgagactccctctcaaaaaaaaaaaaaaaaaaaagagagagagagaacaacccatgtcaagtacacacccacatccctcttatcccaaataccaaacacacaaaaatccaatctgtctccttctacctaagcaattgtagatagtcactttcccataattaccttaagctccctgacttgctgctcgtcctttctctggcaaaatctcatccttggatgagcccgacttcgtgtttgctcaatgacaccactcacctgaaccagaaaaaaatatcaaaaagtggtcagagatatcatcataaattcaaattatttacataaaaaattggccctaaatgtttccagaaatcaataaaagttttgtttctccaaagacatcatttcttcagaaacccaacgtgtataacctattttttctatgttcttctaacatttattcaacttctctcatctgatatcttgccaaatcattcaaagagaaaatatatcccattaggcaagagccgaccatattcccatcacctgagaaaatcatatgcacaggatgcgcccacctcacctttctctgcctcatcatgtcagaaaaagtacccctccatttgtcacaaggcaaatctgagataaaagatttagatggcctgtaattccagcacttggggaggccaatgcaggcagattatttgagtctaagagttcaaaagaagcctaagcaacttagggaaactgcatctctcaaaaaaatacaaaccattagcctagcatggtggtgtgctggcacatgcttgtagtcccagctactcagggtggggagcactgaggtgggaggatcacctgagctggaaggttgtggctgcagtgagccatgatcacgtcactgcactccagccagggcaacagatatttttaaaaggctcttctcttttaaaaataatcaaataaacaggtggccatgaggctgaggtggctgcagtgcactcaattcctccttaaataaaccaaaacttgactcagtgtaaataataaaaggaaacttaagcttaaccagtcagaaaccaccaactaatatctaactagagactttccactgtaatgttccaaatgaggccactgctccactttacccaatcaagtattttttcttccacattcaccatataaaattcttcccccaccctccctaagcctctctgttggaactctgagctgcttgcagtctggagctgcctagtttatacatttctgaatgctcaaatatattttctaatgtttcaaagtggctctggtgtaggaggttgttggtggagtgacctgagagtgtacaggaatcgaggccatatgagatctctggactctgcactccattttgctgtgcactcaaaactactctaaaataataatatatctttaaaaatctataactatcacgtagcccttttcaagtctccaactggttggagccagttcgattaaagctcagaaaaaactggttaataagctagttctgacccaactggcaagaagcgttaggaaagaccaaggccaggggagtatattgcacatgcatgcaccaggaaactggaggaagcttggaggcccttcagcctggtcctgagcccgctgaaactgcagttacaggcacagatgcctggggcaccaatctgaatctgccaacatccaaggccacatgaacacaaatgcgcagagtctcctctgcgatcagtagctaaggatgttaggccatgattggactaggatgggagatgaactgagaactatagattctgtaggcttttgttgtctcttcccacccccaagcaacaagtgatgaacacacacacacacacacacacacacacacacacccacacacacaccctgtagtgactaacaggatctccctccagggaatttgcagaaaggggagcagaaaacatcccaggggcctttcacagctacttccttgagccccctttcagacagtgctgtctagacctgtctcagcccaagcatcaccaccctgatatgcagaagctggcatccttacctgaagttcaacatcaagaaatgatctcttctactcaacactgatagaaatacctctaagcaacatcctcattggcaggggtggagtgggggagtttgttaagaagtgaggcctctgtctaccacctagacaacctggaaatttccatctatgccacaaagtccaaatcactggccactgccccagtgtatggcagattagaacatctctccatcggatctgggtttctattccattgagtgaaatggcttttctattacaggaacagaataagggatcaaaagggtcttacaactgaactccagtgtacagtctgcacagacactaggcttgtgcaaatatgacgcagcgaggccccaggacccttaagccagctgaatgtactgagtttcaggaaacagtgagatacattcagcaaaacagtgggcttcatgctgaaagaagtcaatccaagtaaacacacatcacacacacacacacacacacacacacacacacagacaccctagtggccaataggtcctctcaccaaaaacctgcgatcaggagagcagaaagcctcccagggctccaccactgccctttctggagccccttatcagacggccagcctcaggacagcactgtctgatcctggtccagcccaaaccgccatcaccctgtgatgtgggagcaggccacttcaccagaacctctgtggcagaaaatttctcttccttttaaaatgatgagggggaaccttcagacagtgtcctgattagggtgggtggagaggggggtttcccagaaagtcaggcagggcagggcagaagccctctgggttaactgtgtgcttttgatatgaaggcaggtaagactggacaggtgggtgtgttagtgaggggatggactagggtgtgctgaagaactccacttgggctctgcacaccagggaaaaggaccacaaaacatcccatcttcactgctcagagaaggctagatctgctgtgagctagaaagccatgtgggggcagctgatgagtcatcaaatgggagaaatctgagagccatgtgttccacaggcctctggtccttgttcaggcagcagggcactgtgagatgtggctccttggccctttccagccaccaccttgattgcctgctgcaaggaaagagactgaagcccaagaatggggtcttgctcaccataggatgatggctcagtgtgcagagctgagctatggcccaagaggcagaaggtggggatgacccaggctgagctgggggatccaactgaacatgcacttgctaagaagctgtgggctatcatgccttgggaccccagtctgggtctagaattgtagcaaaacaggctactgggaaaagttcttgggaagccaactcacttttgctttcatccatgggcaaacaaaccaacccccaccacttcccactccctctgaaagccacttggccctctgatcgaccacaccacaatggtgtcactctgtaaggcacaggtagacaaggcatccagccatgcacactccagggcccacacatgtccagaatacactggttcttgttgagactccactcttccagctcagacagaagctccccaatctcctcagccactcccaacaactggaggcctgaaaactttcatgcatgccgctatggtctaaagcacttgtggtggttttgattttcattttcctgataatcagtgatgctgagcacctttccatatgccttttcaccaactggatgtcttctttggctaaatgtctattcaaatccattgcccatttacaaatctgcttttttgtgggcttcttgacgtttttctcttttttttttcctatttatttatacaagttccttaggtattttggatatttttaaaaatgattttcaattccactgcccagttataaatctttttttttttttttttttttttgagacagagttttgctgttgttgcccaggctggagtgcaatggtgcaatcttggttcacagcaacctccacctcccagagtcaagcaattctcctgcctcagcctcctgagaagctgggattacaggcatgtgccaccatgccaggctaatttttgcatttttagtagaggcagggtttctccatgttggtcaggctggtcttgaactcctggtctcaggtgatctgtccaccttggcctcccaaagtgctgggattacaggcgtgagccactgtgcccggccaattatccctttctgtgttttttttttttttttgggggtggggggaagaacagagtctcgctctgtcacccaggctggagtgcactggtgtgatctcggctcactgcagcctccgcctcccaggttccagcaattctcctgactcagtttcccgggtagctaagattacgggcgtgcaacacatgcccagctaatttttgtatttttagtagagacggggtttcaccatgttggccaagctggtctcaaactcctgacctcaggtgatccacccacctcgatctcccaaagtgttgggattacaggcgggagccaccactcccggccccattttgtgttttaacatcagtcaacactcgtattttaaaataataacaatgaatggcggtaccttagaacaagggaattatacatctttctcttgtcctagtgcagacattttgtctataaaatgttattcacagatgaattcatgagaactttactgtgaattttaaatccatatacaagtgtatgctcgttcatgaatatttcaataaaataaaactaacagcaaaaaagaattccagagttgaagcagtttcaggaaaaaggagttggcagtataaagtaaaatagcaaaaaatgggtttttttttaaatgggtatatttgtgtctacaacttttttttaattatagcattagacaatgtgtatatatatatatacatatataaagcaatggaagtggcattgttttcatactagtctagaatattaaaatatatgtaatatgtgatcagcaaaataacggccccccccaaagatgtccacagattcctagaaccttacatgaaaatggtacatcatgcatgtgactcaggtaaagaccttcacatgaggagactaccctggtgctatggaatgaacgttgtgttccgtcaatgttcatgtgttaaaatcctaaccctcaaggtgatgtattaggaggttaagccttacatgagactctgccctcatgactgggattagcaccttattaaaggcacaagggagcttgtttgttcctctccccatgtgaagacacagcaagaaggaagcctctatgagaaagcaggccttcaccagacaccaagactgccggcaccttgatcttgcacttctcagcctccaggactgtgagaaacaaagttctattgtttataagctacctggtctaatgcatttccttgtagcagcctgtatggattacgacagtgggctatgtggatgatgacggtgtctccattcaggactaagtaagcacatgagtccttaacagtggaagagaagggggaaggaaagagccacagagacatgtggccatagaagacaggtccatgggatgcaaggttgctaatggtgacagtggagaagagcccaaagccaaaaaatgcaggcagactccagaatgtggaaaaggcgagaaaaaagatcccctagaacctctagagatgaaggtagcctttccaccacctagattttagcccagtgagatccacatcatactctgacctacaggagtgtaataaatttgttttatgccctgacatagtggtagtttgttgtagcagcaatggactaggaatatataaatatatatacacacacacacaaacactacccccccaccacacacacacacacacacacacacacacataactatatatatcctacccttcaaaattgaagcagataaactacacattagcattaacttagctgggtgtagtggcacatgcctgtagtcccagctactcaggaggctgagagggaggatcatgtgagcccaggagtttaagatcagcctgggcaaacacactgaggccacatttcgaaaacaaacaaacaaaaaaacacaacaaatctttgattaagttcatttcccaaatttgaagaggagacaattattagataaagaggagaaaagagaaaggtagagctgctgacttctgtggtggaagcagaggcacaggcccaaacatactcctgtcctcctggctttcctgtcccttctcataagggacacatgaacctctcaaactgaaccatggatcacagacccatacgcagaactcaatacagttttgttctatgattttttacatgtctgtgtccttgtttctgcctcccattcccaactcccttactctagttagaaaaaaatggctattaccaaatatgagtacatcctcatatactaatgccaactgatcaccagctggttttcttcttttacaaagtcataaatctttagactttaacacatcttccaagaatagaatgttattttccagttcattaacacaaattctatatttaaaatgaagacttcacaagttgatttaaataacatattaaccaaaatagactggccatggttcaaactgacattttaattaaatgtgatgataggttgagtaacctagcagtactctaaaatgacttttggttatggctttttccatattatgtttaggctgaggcatccctaaatgattcaattgtaattcctcttcttaaacatgagatttatctttacaaaataatttattttcttaaaattacaagttaattctatagttcatgcatacataatctcagcagatattagctgtatgtgtacacacaaacatataggtatttgtatatacacacattacataattttttaaaaaacttattagtagggtagaaccacgaagacaaagaggctttgtgtaatgtgatggaaacacaattgcaggacgaacaacaggctgctgtgagggctgcatttaccctttctgctgtaagactcggaaaaacacggatagtggatatttaatccgcataacagaaatttcagggtgcagaaaacttcccacaatttttatagacaatgtcaatagaaaggcattcaatgcagggaatacacagtgtgacagtatacaaaaataagcaggttgatggtttagatttatgagacaagagaaagaaatagtagatgatgccataattctccttttatggagttatgaaaattgttcattttatataaggtcaggtgctttcaaatgtcaatgagaaaaatattcaaaggaagaatcaaatctaagacatggagagatctttataaaaatgaccttcaggccaggcacggtggctcacacctgtaatcccaacactttgggaggccaaggtggatggatcacaaggtcgggggatcgagaccatcctggccaacatggtaaaaccccatctctactaaaacacaaaaaattagccgggagtggtggtgtgtgcctgtagtcccagctacttgggaggctgaggcaggagaattgcttgaacccgggaggcagaggttgcagtgagctgagagcaccactgcactccagcctggcaacagagcaagactccatctcaaaaaaaaaaaaagaaaaaaaattaccttcattctgagaaggtataatcatcaacacattcttgagcacaactatgcacatacgcacttccaaattcacaaaccatgcttgtgcacacactgatgtctctagattccttttttgaagagagggcaacttggtgtgtcacccaggctggagagcagtgttaggatcatagctcactgcagcctcaaactactggggtcacatgatcctcctacatcaggctcctcagtagcctgaactataggaatgagccaccatgcccagccaatgttttcatttttttgtagagatgaaatcttgctatattgcccagactggtcttgaactcctggcctcaaggaatcctcctgccttgccctccaaacgtgctgagattacaggtgtgaaccattgtgcccagcaaccggattctttattaagaagaaaatttgtttcctgacatgtaggcaatgaattgataaataatagttcacaaattactaatttacaagtcaatataaatgaggtgagtaaacacaaaaataacagcataaattaacagttcatgacttcacgtttctttttctcctttaaaatgtagctctgacagagactactacttgtccattccatggaaaagtcagaggtggttaaaatgtcagaggtacacttactaatactttgctgccttttgtgtagcttcctctcagtacttcaccagttgggattgacacacctctacagctgggttcaggagccagacagcagcacacagaacggggaatccaaagccatctctgacactaaaagcaatgaaaacaaaaataaccaaacatattatcaagaaatgaacaagagattgatatcaagtaaagcaagaagagaagaaagcatttaatctgccaggctttcattctgacaaaataatttacaacatgtatgtctctatctgacatgagtgaatagaaaaagaacccaaatacccagttgaattgcaagatgaaaatgaaaaagaactcttgcttatttgccagggtacaatctaatctgggctactaaaacactttcatgcactgattctatgtaacacatgctttattgccatttggaaatgggatttcttgctttgatttaaatatacttccttggatttctgctttaagtatactttcttaaacatattcacagttacattctcagtacaaattttcaggtgtaagtaactacttctgcttttgatagacagtataattggtgaaataagctatacttccatgtaaatgtgagagtacaaggtaagattccagcgtcaagtaaaacataacagtcaagaaaataaaaaggtgagagtaactgggcagtggggaaatcttgtgtgtggaaagaatgaatctgtaaaactgttctttcctaagagagttcagcaggatttggatgatagagagctttgtgtacaagggttccagttccacatagtttaggtctaatttcaaaggcaaattctagtgcaacctgtgactcacgctgtcctaaagtgctgtatgtaaagggtctggagataacccacaagcagcactgtgaacccctgacagcaagcctttccagataaataccaggtcagtgtctacagctgatgacagagcagaatatctgaaaaataatacttcttcggccaatggactgccagtcactattatttagtgtaaaatactgtattacatatgtgtaattttttaaattgcagtgtttcacatcgaagcaattaaatataaaaaccaaatgtttattcagcttaaaggcaacttagaaatactgatcccagatagaaagatgctttagtcccaagtccgctgttctaaaatgccacaactaaaccaacaaagggatcttgaagcataataagtgttcataccttttcaactatacctctgcttgtcttgaatataaaaacctaagctgcagttatgccacagcacagaatgtgttatattttacatcactgagccttagttttacaaatggtaaaaaatagggaaggtaaactgaggttttcttaaggagctgttacatccaacagactcatgaaaatctttgccaaatgtccccggtacatagctcctccccactgatgggctcaacggggagaagctatgcacatgtctcaatttgcatatgctcaatggcaatacaggattcccaggataaagtaagggatataaatgacacagcacactgaaaagactgtaatgttacttcagaacgttgcaaaataaagatcacagatgaaagttttagttcactgaagcatgtagtcatgtatatttttcatttgtgtgttttaaagtcttatactgcttacattcttcttttttgtttgttttaaaataattatatttggctacaaagatcaataacaaggatgatgtcagtccaggttggacaggcagttctggggcagatgttcttgcagtgttctttttttttttttttttttttttttagtatttattgatcattcttgggtgtttctcggagagggggatttggcagggtcataggacaatagtggagggaaggtcagcagataaacatgtgaacaagggtctctggttttcctaggcagaggaccctgcggccttccgcagtttttgtgtccctgggtatttgagattagggagtggtgatgactctcaaggagcatgctgccttcaagcatctgtttaacaaagcacatcttgcaccgcccttaatccacttaaccctgagtggacacagcacgtttcagagagcaaggggttgggggtaaggccatagattaacagcatcccaaggcagaagaatttttcttagtacagaacaaaatggagtctcccatgtctacttctttctacacagacacagcaacaatctgatttctttttcctttccccacacttcccctccttccactcgacaaaaccgccatcgtcatcatggcccgttctcaatgagctgctgggtacacctcccagacggggtggcggccgggcagaggggccccccccacatcccagacggggcagccgggcagaggcgccccccacctccctcctggaaggggcggctggccaggtgggggctgccccccgcctccctcccggacggggcattatactgcttacattcttatgtgggaaaatatatcttgtttgggctttctggatgaaatatgaacaggcaaaactaaaaataattttacaacccaaatcaccagatgttaatggctggtaattcaaccagaaatctgaaagacaacatctatttcactgtgatatcagtgacaaggaagattttatttgtggtatttaagtgtagtcctctggaacaaatgacttggttcacaggcagcacgcccactgctgaactgccatggcctgacagcctgtcttatttgccaaactgttcattaggtttggcaatcttcacctgtgcctccagcttatatttcagcaaataatacatatcagtctgcttttgtcatcttctgcagtgagcttccaacactcctttagcatatggtgcccctgcatctgcaatccttcaaacataccttgtatacatgtcattatttttcaactgtcaattcagcttccagcttggaggctagcctagcttaaataaagcaaaaatacaagacagagaatacgcaaagtaagtcctgcattgtaaatattaagtgggctgaccaatcatttaattaacattaaaaaagaatacattcaccatacaaatttaatatttaaatattgatttcagagcatattttggagtgaggcacaggtgacaatagagcagaggattcctctcccaattgtctctgacctatccaacctttgttacaggtcagagagttctccaacttataaataaacaacagagataatgtggcaacaaggacacagagacgtactgagagtactgctcagctctctgcctaggcctgattctgctgatccctgacaatgagtgctgtgaaatttacagcagatcaatacacatacacacaaacacacaaaagagatacttcatgggcaaaaagcaccaaagatatacaataaaatgtctgaaagaccataaaacaacttctgatgaaatgctgttttcattttgcagaagtaaaatattcaccaccaaccctgtaattagcttaaaaattacactaagtacagtaattttggatcccatctccaattcataccttatcggcatgtaataatcacactgcatctacaacaaagctggaatagactttatatgctgaatacaacttgtacagtaagaaggtaattttttgaaatactgagaatacaacatttgtatgccacactctactgcacaagttaaaagaaaatacaatcatttctattctcaagtgtattgaaataaaatacagaaaagagtattctaataccagttaacattaagagaatatatctctaaaccaaagatcttggatcttccagaaagacaaaatcaacctgtatatacttgggtaagaaaaaaaaaattaagagatcaagaaaggagagaggatgttagcatagaatcatctccaaaaatggctttccgatgcattcgaccagttttcaagtccatttgtttttcctcctttagcatcaacagcctatattaccaaggaaatgcaaaataatccaatttgtacattaaccagctaatctagaaatggcaatacagtcaatgaaaatacaaagaaatataaaaatgtcaaggaattgtttaagatgtttaagatgatacagcacagggaaaaaatgatctgataaacactggaagagttaaactcaggcatggtttcctaacaccacacttcaaatgaacttatagaaagaataaaggaataatcctctaaaaaaaatctaattttagaaaaaaattgctcaaaaggaaagttagcattttgtacatcttttggaaagctgattaatttctaagctaaatgatgcttaagataatccttaagagaaatggctgagtccaggcccaaggcagaaagagggcaacataagcctggatacttttgttctgtgagaaagtaagaaatgctcaaagattaatagagacagttgaaaggacacaggacacaggctgaaggctcccacggtcgaatctgggacagcataggcatcagaaagaacaatgacagtgatggaaaataacccatggaataaaatgcaagtgcattagtcagcagagataccgaaataaaaaggagaagtgaaagctctttgttaaaaatgccagctaacaaacgtcggaggaatgacagaggaagaacatccattttaagtcaccagtgccataactgataaagaagatcatcaagaggctaaaatcactgcataaaagaaaactatatgaagctatttaacatagcacgatatataaaagtatgaaaacataaattagaaaaaatgaaaaatcgtaccataggagatgaataagttagaatacagcaataataggccagccgtagtggcttacacctgtaatcccaggactttgggaggccaacgcaggaggattgcttgagcccaggagttcgaggccagcctgggcaacatagtgagaactcgtccctagaataacaacaaaaaaatattagatgggggtggtggtgcactcctgtagtcccagctacttgcggggctgaagagggaggatccacttgagcctgggagttcaaggctgcagtgagccaagatcacgccactgcactccagcctgggagacaaagtgagatcttatctcaaaacaaaacaaaaaaaccacagtaacaaaaaaaaacaccaggaacaacaaaatgacaactacataaagactgtatagaaaacaaaacgctcagaatatagaaataaattatgtattttacctgtaactatattagaagagagtattcttgtagacaaggatgaccagaaggatatgcaaaaatgaaaatagctaataacactcattatgtcaggaactttagtacgtagtttgtgcacattgtaacaaattacatactagattatctcaaaattttcagataaattttactgggagtcataaactaatacaacaaaaccaatgttttgcaaacatccactaagcataaaggtatacaaattcccaagaaaggctgaaaaataattcacataagccacacatcagtggaaacctacccataggagataatacaacataatctaaataaaactttcagagacaaggcatgtggcttctggacagccacaaactccctgtttctgctctagtgttttggccaccaaaagaaagccaagtggcctcaggtctcttaaaaaacaaaaaagcaacctatggaagatggcgtggtatttgaggaatatttggggtctcttgaaaaatgcatcctgtattttatttcaagaaaagactccctcataatgtcaggtaagtgaagagccctcagagacacatgcacacacaaagaaaaacaaaacaacatagaatgaatcccaccaaaatgtgttatgatggcagaattatgggtgatatgatcttctgtaatatatatttttattaaaaatagaaaaaaagcagacttacccttgattatctatagcctctgacccaagtggcttggaatcagaaaacaacatcactcgacttgaagccatcttggcatcaatggtggagtgggtggagatgagactctggaccagctcatgggtgggccccacctcgtcctgtcaagaccaccaagaaagggcacgtgaggaaagcacaaagatcctggagagacactggtttcactcagttctcaaaattatcttagacacatttcctgagaacctttcttaatgcctcaaaaaccagagaagaaaatccttataacaaagcttgaaatggatccccatctccattaaacttttccaaacctcagtgagtatacaacctgataacctaaacacctcgctagaaaaatctcagttccaatcctacaacaatgctagcttttctaacattttaaaataaccctgattttaacccaataaaattccacttcagaactaaaaatactggaaatccactttaaaataaagaatgaggagaccattgtgaatgagaaaaagaaaaagaccaatgagagctggaaagcacactgattttgtagaaacggagataagccgggcaggtgccacactggcagcagtgcccatgctggggccatggatcaaggaggcatggaggacaggactcttctgcttggtacaatgaaaaaatggtattctttttattctacatattgacaatatgcatttgggcctctattataagtacgagagaaaaatcttcaataaataaaagctgagtatattactttttttaattaaaaaatagattcggaaagaataatgagagttcagagcaatgactcctgcctcactgatgcctgaaaaccgtggctgccaccaaggtcaacatagacagcgtctttgtcatacagcacacccccaactccaaaaacaggcgcataaaccagctgctccttcttatttaaacagcacttcttttgttgttcagtaagagcacaagggtctgggaagaaactgatgtcactcatggcaaaatcttctacccctggaagacaggacccaaaaagccagcttcaactgacaagaagtcagtaagtatctactgttgactggggggttaaaaacgatgcacactccaagggcttaaaccatgaccctaaagaagggcattgtgccacactggaacagtggccctctagctacaagacaagaggtcagagaagaggcattcggtaacacctttgcaggcctacacatagctggcttacttttaaaacctccaccaaggccatcttcccttgtttggtcatttttcagttttcctgagaaatgaagccatcccaagaatcctatgtgtgattctagtatgttctacaacaagagaatacctggcatgtgaatttggcttttatttttcaagtgcgctcctcttaaataaccgtaaagtaacatctgctggtcacatctgatgtttgtttggatatcctctgggtttgtcaaatcttccaccctagaaaaataaactcaatcatacagcagaaatgaatgccaaaagttcctatacctcctttcatgtgtcagtgactcatcacactcttgtccactaagcacattgtttagaaaactagaaaatacagaaataaggaagcaccagaggaaaaggggcaggcacacaactgtgtctctaggctgaaagtgacattcattccgtaagacaccagacagggagatgacgtccacctggggtcagagaagagtaaagaacatattcagaaaatccctttctggaagagggtgagcctgtgctctgggatttgtactgtggcttggattctggcaggtggaaaaagggtattccaggctgagaaaaccacagcacaaaggaaggaaactgaaggcacacacaaaggactcaagcacccaggcacgaaggcagcatcactgaaatctgaggctgaacataggatggggccacatcctgtggccttaaatgcttccaagtcctcccactttcctaaacatctcatagttaatttactcccaaaggcacagcatctttgagcaatgatatcagtagacattttccatccactacacttctacccccactattcaaataggcacaaaataaatcctgtcactgttctttttctagcctttttagctttgaaatatatggtccaggaattaaaagtttacaatcactttttacctgtctgccaggatataaggatgagaagtctgccatgtgagaggcctaaacttcataactgtaataaaatggcccagattgtgcatttcttggttttgatattctccatgcaccattccagaaaggcagaacagcttggcaacctaaacattaaaggaaaattaaaaattaaatttcaactaaattcttgtcaatactgcaacaaaataaaagctctaaacaagaagcaatcctaagaagggagacttccagcaaagccactgtcctgaggcttgcagagccttgctggcttctttcaggacttattagaaccacacagaggcagactgctctgcagccgagcaggggcatccatctaagtatggtgaggagagggaggtgaggcctctgagcacagaaacgattctgtggctgatggaccagagcagtatggaaaggaaggggcagtgcctggtcctgtaactgggagaaacttctgacgtactccattaagtcccaacccccaaacacccagacactgcctggtgcagcaggtacagagacaaatgagatacaccaagaggcccagaataaccactcttgagggaaaccttccagagactgggaacacatacgcaaagggaattcaggaggcaaatcctagacagacgtttagtaatgtctcttcagtctgtttgtttgtttgtttgagacggagtctcactctgtcacccaggctgaagtgcagtggtgcaatctcagctcactgcaccctctgcctcccagcttcaagcaattctcacgtctcagcctccagagtagctgggattacaggtgcgcgccaccacatatgactaatttttgcatctttagtagagacggggtttagccacattgccctgagctcgaaactcctggcctcaagcgatccacccacctctacctcccaaagtgctgggattacaggcatgagccactgtgcccagcctcttcagtctattttaaaaggattatactgttagcatctaacaattatttctcttcctaccaggtaaacttctgtccagaacctgtgttttaatcgcttctttgtcttcttcagttgcttattgtgtttgaagaagtcgaggtgggtgagaactcccataattttaggaaagccatgtacttgacagatgtttagaaactcaaacgtttccatttcaaacccaaagctggcatctataagcatcagtacctacaagcagaacacattatttctcaaagaaactaccaaaacagaccacctacactaggggttggcaactggcccatcgacccaatccagcccatcacctgtgtttgtaactaaagttttattggaacatagccacattaattcatttacatatcgtctatggccgcctgtgcactacaactgcagagctaagtagctgcaaaagatatgatccacaaagctgaaaatatctactatctggccctcgacagaaaagtcccactccagactaaatcaaatgactacacaggcatcacccagagaaaccaccaccctctgacttgctctaaaaggcaaccataagacaaggccactaggatataaacatccattttaagaattctaatgcatgagaagtaactcagaaaaggctggatctaaccaggcccgtacctaagaaatcctaatttaaagaaatgaagttttctataatgtatttttaagccaaataacaggtctctgacatccaaagaatgggaagaaagtgataatcaatgaaatatatttaatatgtacagaaaaccaacctcttctttcaatgtcctcacaaaaaaaaaactttttttgctgggaagtatgcagtgtatacctctatcttgtatgttaatttgtataactcaattgctcaggaatttctttaaatagctaccagtttagaattaagtcaaaaaacagtaagattacgatgaatggtagtctataagaaaatataagcagataagaccaatttttaaaattaagacacttcaaagatgcaaatttcagaattgattcctggaaacttctagttttaatattaaagatagttctgtttttatctttccatggataactaaaactaacaaaaaatggaaacagaaatgcccatctttgattaaactaggaaacattcaaaacccgaaaccacagaatatatgaagttgggcttgtaggaaagcacagatgcctctggaaaccgaggcagcaagcagagctctccagcaacagtggaccagctcaaagaataagtggaatatcctcacaccacatctgatgccacagagtgccaaggggcaagcagctggttgtaggatcaggaagaacagggagcaaacagtccctcagctgccaatctttgtcatctaagccagtgttactcccataatccacacacacacacacgtacacacccaaatccacatatcgtttgtgcctttgctgtactcaggaggctttgaaaacccagagcagagcaatcaacataagctaagctaaataaattatggtgcgtccacagaatggaatattatattaaaaagaaggaggcagagctacagtacttactgattatatacctccaagatatattacatgaaaaaagcaaagcatagaacagcgtgtaaaataagctaccatttgtgtttttaaagggtggcatgtgtgtttatatgtatctggaaggatactgctctgcagggacctgagagaccagccttagagcaaggaaaaagaaaatgtgcattgtgtataccctgcattacagttagagtgctttaccaaatgtgtgtgctccttttgaaaatcttaaaaagatttacataggcatctctctcaatgatggttaagagactgggaaggggagcagggagggagggaaaaagagggaaaggttaacaggtacaaaaatacagttagaataaattctagtgtccaacagcacaatagggtgactataatttattatataattcagaactaaaagaatgaaattgaaatgttcccaacacaaaaaaatgataaatgtttgaagtgacggacatctgaattaccttgatttgatcatcacacattgtatgcttctatcaaaatactacatgtaccccataaatatgtacaactattatgtatccataataactaaaaataaaaaaaagtaaaggcatctcttaatatgtctttaaaattagaaacttgctacatcttaaataaaagagaaacaaatgacttctatgaactattcaatcatttcaagtatacaagatttagtaatccttacacaactttacattaataacacttatttttactaatagtagcattacatgttcaaaatttgaatgttatttagttttctgacattacagacattacaatggcacgactttaaaatctgtattaccttttactttatattttaggagtcttcctgggccaaagtatgaaatctgtagctctagaaaaaactaaataaaaatgaaaaaaccaaggtatctgtcatcccacacttcctaatcaatatggcttattttttgcttttttttttttttttttttgagatggaatttcgctcttgttgcccaggctggagtgcaatggcgggatctcgactcaccacaacctccgcctcccgggttgaagcaattctcctgtctcagcctcctaagtagctgaggttataggcatgagccacctcacccagctaattttgcatttttagtagagacggggtttctgcatgttggtcaggctggtctcaaactcccaacctcaggtgatctgcccacttcagcctcctaaagtgctgggattacaggcatgagccactgcgtctggcctttttctttctttcttttttttttttggtaatttgtattttattttagttaatttaaaagatagtttaaaaaaaagatagttaatagaatatcagaaatagtgaacattatcatttccataaatgcaagagcgtgtacatttttccacacactgagtactatctagattttctatgataaactctgaccacttcttcaggcaattcatgtacttacttattatcactaaggataaaggttctagaaccattaggaacaagggtcccatcttcacacaagttacttaactgctgggaggctctatttcatcttatgtaaactacagataatacctactcacctcaagggtgtatcaagggtttatgtaagctaaatttgtagaaagcagttagcacagtgccaggaagggtccaagaagaaatggtacttactatgatatatttgtaggtatatatgtatgcatgttaatgagttcttattagctgtgttcattaaaggttttctctatcctgtgatttgcttttagattttggaatacattttattgtacacattccatttgtattattaatataacaacatttattactattattattatcatcaattcaatcacatctattgtatccttgatgatgaccatgattcctttaataatcataaaactctattcccttcatcacggggtaaataacctatcacaatgctgtaagtctccatcagcaccccaggctgcccctgctcacttaccagatctgctacttcagccagatcaatcatcatgttaatgtcacacccacattcaataatggtgagtcggagctttttacctataagtgaaaagatgaaaattttactttaaaaagaccctgaaaaaactctaagcatcaactctaactttcattttttacctgtatccagtaaaacaccatatacgtttacaggagtgtacgagaagttcacatttaccggtaaaataaaataaattccatcctgtttttcttgctgtgttctaaatttaaataatatccaaagtctacccagatgaatacaagtgcttaaacagggaaaattctgactggacaggctccatgataaccatgatcctgctgttcagctgtaggccaatgtctttgcctctatcaaaacttcccatattcccactatcactaaaaacatcctcaaacattatccaacagaatattcataacgataatcatttctaaattaaggtaaaaagaaaacagtcaagaaaatatgggcagggcacagtggctcacgcctgtagtcccagcaccttgggaggccaaggcaggtggatcccttgagcccaggagttttgagaccagcctggccacatggggaaaccccatctctacaaaaacaaaaaagaaaggaaaaaaaaaagaaaaattagccaggcgtggtggcatccactactcaggaggctaaagtaggcggattgcttgagcctgggtggttgaggctacagtgagctgtaatcacgccagtgcattccagcctgtgccacagagtaagactgtctcaaaaaagaaaatatggatgctccaaagataaagaaaagcctcaatccaactatattattgcaataacaagagacttgagtgtacattggcattctaccactggaagtttgtttcatctttcctcaaacttggaaaggtcaccatctcccaaagcagacaaattctcacaggaaaaagagaaaacgcgcacttccactagcatgtggcttcataagggcaaggatgtgcatgcacctggcacataggaggtacgtgctgtctgttaaatgatatgttcacagtgaccaggcctgctaccctcttccaaggaacatgcttggcaaagccatagagcactcaggataagatatgtatcacatccttatctctgggaacttacccttttctgaagttatagctaacttagtaaagtataagagaggtaacatgatatgacaaaatttaacatgttccactcaagaaagcaacaaacacatgcatgtccctcagatgacaatagccacgccaactctgtgtctgtggcagcatctcctacctgacacgatcatcacagggcctctgatctcggtcaacttctgccgggtgaagttccgaatgaggcattgtatcaaagtgctctttccaactttggaggccccatcaccactaccactattggtgggggctctagtggagttcgatcaaccactggaatatgatgcttttttgtcttcaaatcctgagtcctattcattaaaaaaaagaaaaaagtaaactcactttcaaaatagagaaaaaggtatcaaccttataagtagaattttcttagtatacttatagatatgagtactttagtatattttatagagtacaacagacaatatataaatataatgaacttgtcaattattaacttaacttctcacccccatccaaataattgctgttggataaagatgtaacaagacgacttcaatagtatatagagttgaaaactgaacacaccttaaatctgactgttttatgggtgatttgaatagttttttaaaaaccaaaaggtaaataccaaggcagtgcatcataatggataagagcagaggctctggagttaaatttggctctcctacttactggttatattattggaggtaacttgttttcttgacctcagttttcttgtccataaaatgagggcaagaatgattcctactctggtaaggctgctggaaggatttagttgaataacgtttaaagtacactgctaagaatatcacaaggactcactaaataaagctatgttagtaataaatattgtaatttttgtattttatattacaactttgtaaaacgtatccagagggaaaaagcacacttatcaccatagaaacagtttaaagtttaggaggaaacaaattctataaattcttgtatcttgggcaagaaacaccaaccagtgtgcagatgctggaggcaaggcagcttctatagcaaagcctctcatgttttggtaaaagccacacagcatgcatctccatgtcctttggagctggactagacttgtgaatccaaatgtcacctgtgagaggctcctactatttaaaaagaatcaatggaagaagcatcagactgtagctaaacatacctgtgaaaggatcgagccatccacacagcagactgaaatgcaaaagctttgggatttctcttccaggcatcttcttcgtctcctagctggagatcctgcagatgccgcttctttttctttgcagctttgggtccactatttttctttctttgtttcttctggtccttagtctccatagtggctatttaccaataacaagtaattctaatctacaaggaagaaggttggggtaaggaggtgggagaagcattttacaatccaggcaatacccagggcaaaaacattaaattttatttatttctttatgaagagatgatatatttgttcactgaacaagggtagaaactgcttaaccctccccaatttcatttatctctgttatgctataaattagatgagttacctctgctaagggtacattttatggttaagttactttttattcatcttaagtgtcaacatcagcagtatccatttctgcaaggatggaaacattctatatctgtacttttcagccatttagccattagccacatgtggttacttaaaatgtacttagagaaactgaaaaaatgaatttttaattaattttattccaactctaaatagtcacatgtggctaccatactggacagctcagacctagatatcaactggactaatgaagtggtttcctaacttaaactaaaacttaaattttaataaaaaatttaaaatgcttttatgaacttccaacatgatcacagtattacttttagtacctgttgactctgcaaaactcctaaattacaactcttctacatacatttgaaaaatagcaatatctagaggccgggcacggtggctcacgcctgtaatcccagcactttgggaggccgaggcgggtggatcacgaggtcaggagatcgagaccatcctggctaacacggtgaaaccccgtctctactaaaaatataaaaaaaaaattagctgggcgtagtggcgggcgcctgtagtcccagctactcgggaggctgaggcaggagactggcgtgaaccccggaggcggagcttgcagcgagccaagattgcgccactgcattccagcctgggcgacagagcgagactccgtctcaaaaaaaaaaaaaaaaaaaaaaaaaaaaaaaaaaaaaaaaagaaagaaaaatagcaatatctgtatgtgtgagacatgactagttctagatgatgcctggagaccccatggacttacagagacccttccagtgatttctgaggtacctgggaatctgtggccaataaattggtaatcactgaattagtgagttttttaaggatatccagctgcataaaatctgacagcttgattggaaaaaagcggggcagggtgccatttcattcaattaaggtcctgtattcattccgtttagtaaatgtttgtgtctgtctatgatgtgctagccactgtgccagtaaatggatatagctatgatctgacttgcagaggaaatccaaactagtatcttccgtgccatgcaataagggctacattgcaaggctgcacagggtgctactggggcacagaagtgagtcagaggcttcccacagacacacacacgagcggaaacagaaagtctttatatatcaccatatgtcaaggaacactggccgggagttaggagagctgggcactaggaacgctttgaaaccgaacagctgtgtgatttccgaggttatgttgcttctctactatattttagttccgaacttgtactaatgtttctctcccttttcttcttggtgggaaaagcacaatttggggtcaacagattcggctcaggtctaagtcgccggccgggaccacgtcgccaggaaacgacgtctccccgacaccttccctccccgtccgggctctctgcagcaattcatcccgtcactctcccaacgaccccgggcacacctccggcagatgcgaaatatgctgctcctcaggaggaaagatgacccggaggaccgcgggaggaccttcccactcgcgatcttcccagtgccccaaagccagggaccccactgccgcctaccccagcccgcggcaccgaacttgctcacaactgtgactcctcaggtcggattggacaccaccggaaacggaaattcaccgtcgcgccgactctccggagggaaacaaaaaggcagaaaaaagagaccggcgcctggacgactttcaggggagagctggaagaaagactgtcaacagctgagtgcgggcgccggcgccgtctacgcagtgcgttccaccgggtccgtatccctcccgattccgccccaccccgccctcggaactcgctgcctcaactcctgcggtgggactccggagcagcgtacaccgcccttgccttagtcctccccaaggccagggcagctgtgcggcctggcgcgggttacttggtgtggtgcaaaaagccagaaggagacacatttggtcctggccaccccggagtcacccaaaccaaaaggtaaaaggaacataaaaaagccttctggaaagtgtaaaaaaattcattgcacagtgatttttgtcttgtgaaatcatagttactgttattagcagttttttaaacgttttatattcattttttatggtgttctgacatatgagctgcttcaagtgtttttggacatagcttgggtgtaaaatgtaaaaagtggatattttcaatttgtagctttcttttttgaaacttactgaagtttgttctaaatatatccccttctttctcacctaccccaacacatttttaaaaaaaacaccaccaaatatccattacagcattgatgtgagtgtagatgaagtaaaaactttggcttccctgatgacatacaagtgtgcagtggttggtaagtgatcgcctttcttgctacctaatgagaactctggggaaatatgtttactcacatggttactgttaagatgctatagaaatataccttatcagaactgattttttttaagttgtcctctttaagacctgcatcatttttcaattagtctaaattaatatatagcctttttttatgtgagggattttttttataggagcttattgaattttaagtctagatctttgttttcaattcctcaacatattctataaataagaccaaattatagtagaaggatagtaaataagctattatcttttagaagttgtaaagagcactgattaactctatattagagaccccgcccctgccttggctgcgcgggcccccgccaaagggcccatggtcggcgcagccgagctggcgagggcagcgcgggtcccccggaacgccccccgaggcgagcgctaacgaggtccggcaccatgtgctaggtcactcccagtgcaaggccacacttgggccatccgagcaacccctcctcacgtcaggggtcaccctccccaccacccattgccccaccatggccggagaccggctcccgaggaagatgatggacgccaagaagctggccagcctgctgcggggcgggcctagggtgcctggtcatctacagccgctccttcctggagtacaacagctggcatgtgctcagctccgtcaacatctgctgctccaagctggtgaagtgccggctgcagaagggcaaggtgaccattgcagagttcatctggctggccacacgcagccaaatggaggccactgagccacaggatatggtggtctatgaccagagcacacgggacgccagtgtgctggccgcagaccgcttcctctccatcctgctgagcaagctggacagctgcttcgacagcgtggccatcctcacggggggcttcgccaccttctcctcctgcttccccagcctctgccagggcaagcctgctgccctgctacccatgagcctctcccagccctgcctgcccgtgcctagcgtgagcctgaccctcatcctgcctcacctctacctgggctcgcagaaagacgttctgaacaaggatctgacgacacagaatggaataagctacgtcctcaatgccagcaactcctgccccaagcctgacttcatctgcgagagccgcttcatgcgggtccccatcaacgacaactactgtgaaaagctgctgccctggctggacaagtctatggagttcatctgtaaaggcaagctgtccagctgccaagtcatcgtccactgtctggtcggtatctcccactctgccaccatcgccatcgcctacatcatgaagaccatgggcatatcctccgacgacacctacaggttcatgaaggataggcgccagtccatctcgcccaacttcaacttcctgggccagctgctggagtaggagcgcagcctgaagctgctggccaccgtgcagggggatgcgggcaccccctcagggacgccggagcctccgcccagccctgcggctggggcccggctgccatggctgccaccacctacctcagaaagcgctgccaccgggagtgcagctgccagggagggcggcctgagcgcgggcggggagcccccactgccccccacgcccccagacacctgcgcgctgcagcagggctgcgcggcctgtactctcctctgaccgcctgcaggacaccaaccgcctcaagcgctccttctcgctgtacatcaaatcagcgaacacccccggccggcggcccaacggccccgggtcacccgaccccggcgaggtcccaaagctctgcaagctgcacggcccgtcggagccacgctgagcctaccttcgcccagccccgacagcccggatgccgcgcgcccacggccctgcgggcggcccaggcccccagccggctccccgctcccccgcgcacagcctcggcctctcggccctgtcggcgcccaggctgcccggccctggccagccggccccggagtctgggcgccaccgcttgactccccgggcacgccgtcgcccgacgggccctagtgcttcagccccgagggcgcgcagggggcgggcggggtgctgttcgcgccctttggccaggcgggcgccccgagacggggcggcggcagcgacctgcggcggccggaggcagcaagggctgagccccgggacgcgcggaccaactggcccgacgagccgccccggagacggagacgcagatcaagcgctgcagctgccagatggagttcgaggagggcatcctggaggggcgcactcgcggcgaggagctggccgccatgggcaagcaggcgagcttctcgggcagcgtggaggtcatcgagatgtcctgacccctccgctgcccttagctccgctgcccacagccagacccgttataaatatatattatatataatgcaaagaaaggtaaatggttttacttttatttttattgagaagtaaatatttctattttttatttatttaagctattcattctggcaatgatttggcaacagtgcaggtggtcctcgagctctatttttactgtctggtatttaaactgaaacatacctttctaagcaatacgaggccaccttcagtcgcaaggtgggtgccaggcctggtgcccctcccagttcccccaccccaggaaacactgctgacacttgcaaaggctgccgagcttttgtgcactttttacataagaaaaaggattaaaaaaggaaaaaaaaaaagcttatttgccacaaacagccgcggacccccccccccaccttcttcctcccttcaggctctgccccaaagccataggttgggggagcaggagctggtgtgccagagagatgcggccagccctccaccagctccaggcaccaaatcttggtggcagggagggcaccccgctgcccgttgccccagagctgttccttctcaagggaggacaggcattgggccccatggtgccaggacgttgagaggggctgaggaatagaacagagtgtgtaggggcttggggcagggggttctggagcgtcagatgaggtggagcccaggggaggatgggggtgttgttaatgtccccaactcctgccagagccccagtccagccactggtggctcagaaaggccattcccagagggctgcggccctcccttctcctttgaccctgcccccagaactacctgccaggcaggacggcaccagtgcaggagaggagcttggcctccgggggtgacgcaggagtggggcctggctagcctgtgctggctccactgggcggggagccctggaccgccaggtatgcggagggggtgggcttagggtcctgttccaggtccgtcccccacctagcaagtccccaggcaggacttggaaaccaggtgtgcaccagcaggctaaggggctccaagagcaggtgctgcttcgcacaggaagttcaggcgccagccaagtccctgtgcttctggggtaggcctgcttcacttagggagcgctgccctcaaggcagataaagccctctcctttgccccgacctgcatgggggcttctcaggagagaaactcccgtgtgcccctttcccagggcactctctctagacagcatgccggcccccaaacacaggtggcttttgggcccaggtgggtcagcctgctgcccctggcccataccctctcaggccattgggacccctgcccttcagatgttctagggtctaggagtggaccagtcaccctgggaagaggccagggccttggcaggaggggtggcccaggcaggacccagtcctgagtcctggagcaaggccagggaggcgcccaccccaccccggccagctgccctctctgctgtttgttctatttgttcttcttttcacccatagccttgtgttcctgtcatccctcctttcagcaaaagtccttttcccattccctctgtccccaccaactgctgttccccaagaaaataagctatcattgtatttgcaatctatggattagaggttgaagtatttattattattggttaattattattaattatataaaatatatatattagaacttggctagccaattttattgaacaatttctgttcaataaaatgttgtttaaagtacagtttagaaaactatggtaggtttatttcttgaactttcagaaattcaagcttaaagcatcacacgtttttctaatattgtgtggcattttctgtcattttacttttttaacctttatatggaataacaaccatcagccttgtctttcagatgtgccatttgggggtgctaaagctggtgttaagatcaatcccaagaactatactgtaaatatgagagtgatacttgtttttttttgttgttgtttttgtttttctgagacagagtcttgctctgtcgcccaggctggagtgcaatggtgcaatctcggctcactgcaacttccgtctcccggattcaagcgattctccttgattcagtaactaggattacaggtgcatgccaccatgcccaactaatttttgtatttttagtaggggaggcggtatcagcatgttggccaggctggtcttgaactcctgacctcaggtgatctgcccgccttggcctcccagagtgctgggattacaggcatgagccaccgcacccggcctcaaagtgatatttgtgcacacagtgcatttatgaaggacttgaaattactgggcttctctgtatcccccatatcagtgagatcaatggtccccattgcttttcaaatggaatgaaaaaagtaaagaattaactcattgagtgttttgccatataaaggtcacctacttaatatctatatcctttatcattttgttttgtttggttttgtttttatgagtcttgtattatttttttgctttttgtattattatgttcttacttattaaaaaggtaattaatattttcatattgttagacacttaaacccatatttaagaattactgtgatctaattaatcaggcgtagtggtgcgcacctgtaatcccagctacttgggaggctcaggcatgagaattgcttgaactcaggaggcagaggttgcagtgagccgagatttcactgctgtactccaccctcggcaacagagaaagactctgtctcaaaaagaaaaaaagtattactgtgatctgaagtttttaagtcaggatttcattctagacaaatatcttaactaagcctataaaaaccttactttttatcctgtcagttccaagcaaattcaaactggttgtcacaatgctttacataatactaaattatctgtatacaaacataaacgcgtatgatttttattctctttaaaattcaccatttacatggaatataattatatttcaattaatcttaattaagatttagtaggccaggcgtggtggctcacgcctgtaatcccagcactttgggaggccaaggcgggcagatcacgaggtcaggagatcgagaccatcctggctaacatggtgaaaccccgtctgtactaaaaaatacaaaaaaaaaaaagtacctgggtgtggtggcgggcacctgtagtcccagctgctcgggaggctgaggcaagagaatggcgtgaacccgggaggcggagcttgcagtgagccgagatcgcgccactgcactccagcctgggcgagagagcaagactccatctcaaaaaaaaaaaaaaaaaaaaagacttagtatatttttcagtggggaattaatagaatgggaatttgagtcctagttctactatcctgtttttataatctacttttttgatcccttatttcctcacctttaaaatggcaatgcctactttatgagttgttctaaggattacaagagaagacatatgagaatgtactataaatagaaaataagatgctagctataatctcaagcgatttttatatcttatttttattgttttcttattttacaggataatgaattggaaaagatcacaaggaggttcaccatggagctagcaaagaagggctttattgtgtggccacatagattttggtataaagtgggaacatctaaaaaaatcttttttttttttttttgagacagagtcttgctctgtcgccaagattggagtgtagtggtgcgatctcctccacctcccgggttcaagcaattctcttgtctaagcctcccgagtagctgagactataggcatgtgccaccatgcccagctaattttcgtatttttatagagatggggttttgccatgttgatcaggctggtcttgaactcttgacctcaggtgatccacccatctcagaatcccaaagtgctgggattacaggcgtgagccactatgcccggcctcctactatttgtaataggagatagggtcagataagggaataaaagcaggctgccccagccaggggcagcaaccagctcaggtccccttccacactgtggaggctttgtttttttgcgctttgcaataaatcttgctgctgctcactctttgggtccgcactgcctttatgagctctaacactcatcgcgaaggtctgcagcttcattcttgaagtcagtgagacgaagaacccaccaattccggacacagaagtgtcttcatttaaaaaaattttttaagtgcactgaaaaagcatcacatattctagcctcgtaataatgctccctttttggagatcccaggaatcagtgtgggctctgcccagagctcagagatctagtaaaaagacagatagttcctatataaataaaattggtctcctcatataatcctatgatagatttttttttttttttttttttggagacagagttttcgctcttgctgcccaggctgggtgatcttggctcactgcaacctgcacctcccgggttcaagtgattctcctgccttagtctcctgagtagctaggactacaggcacccaccactgcaccaggctaatttttgtatttttagtagagacggggtttcaccatgttgggcaggatggtcttgatctcctgacctcataatctgcctgcctcagcctctcaaagtgctgggatttgggattacaggcatgagccaccgtgcctggctatcctatgatagatttctaaaatgttatgtttgatttggcatccttttttttgtgtttttttttttttttttgagatggagacacactctgtcactcagcctggagtgcagtggcacaatctcggctcactgaaacctctgcctcccaggttcaagcaattctctcacctcagcctcccaaatagccagaattacagacatgtgccaccacacctggctaacttttgtatttttagtagaaaagggttttcaccatgttggccaggctggttttgaacttctgacctcaggtgatccacctgcttccaccttctaaagtgctgggattacaagtttgagccactgcgcctggtgtggtatgtggttttactgcatgtgactagtttacatgcaactagccatgcaagttcagtaacccaaggcggtctataccctgttcaacaagaaccatctactgatgacacttctggaagtctgggcaatatcaacttgctgtaagagttcccaaatgctctcaattatcaggtgataacaaagttttcaaaccagtaaattttgagtagccctttactaggaataatcttgaataagttagtattgccctccacaaccacaatttaaaaaatatccgtattggttttctcttcaattcaagcatcatgtaaatatgtaatgtagaaaatgaggatttcccatattcccatagaatcacaaagatgatcactggtaatatgtgtgctacatatatgataccaggtttattcttttttttttttttgtctttttttttttttctgtcacccaggctaacatccagtggcacgaacttggctcattgtatcctctgcctcccgggttcaaacaattctcccacctcagcctcccaagtacctggaattacaggcacctgccaccatgcccacccagctaaatttttttgtattttcagtagagacgaagtttcactaagttgaccaagttggtctcgaactcctgacctctggtgattcacccaccttggcctccaaaaatgctgggattaaaagcatgagccactatgcctggccatttttttgtactcttatacaattatatacttgctttataaaaatgaacttattctacatatatatgttattacattattaggacatgttccctaatgacatattacattttcatcacttttttaaaatatttttttcctgagacagcatctcactctgttgcccagacgggagtgcagtggcctaatgacaggtcactgcagcctcaagctcctcggttcaagggatcctcccatcttggcctcctgactaacccagctaagtttaaaaaaaatttttttttttggcctggcgcagcagctcacacctataatctcagcactttggaaggccaaggcaggcagatcacttggggtcaggagtttgagaccatcctggccaacatggtaaaactccgtctctactaaaaatacaaaaattagctgggcatgatggcaggtgcctgtaatcccagttacttgagaggctgaggcaggagaatcacttgagcccaagaggtggagggtgcagtgagtcaagatcatgccactgaaatccagcctgggtgacagagcaagaccctgactcaaaaataaataaataataactataacttttttttttcttttttggagaaacaagtctcattatgtttttgaactcctggactcaagcaatcctcccatctcagttcccaaagtgctgggattacaggtgtgaggcactatgcccagacattttcatcattctttctttttgagatggagttttgcacttgttgcccaggctagggtgttacgtcacgatcccggctcactgcaacatccgcctcccaggttcacgtgactctcctgcctcagcctcctgagtagctgggattacaggcatgagccaccacgctcggctaattttgtatttttagaagacatggggtttctccatgttggtcaggctggtctcaaactcccgacctcaggttatctgcccacctcggcctaccaaagtgctgggattacaggcgtgagccaccgtgcccaacccattttcatcattcctagtagccatggagcattccctttaatcaactgtacatgaaatttttttttctgggggcaaggggctcatattcacacagatgggagtccagttggtgagaaggtggcaggcggcacagccaccttatacagcatgccatactggtccactgtcagaccggtgatggccacagctccatcaccccgaggcggactctggctctgcccagccaccacaacccctggggaccattcagaggcatcactggagggtgtgtggttagtggagcagctggttgtggggaggtctcgtttctttggtggaaggcattcctgactcctctcatgaacaggtttcatattgctttgtggtgttcctggagcctggaaggagttggcttgctccctggggcatcaggaggggcttctcggtagtttccctgtacccctctaggtttctggctggggcgcccacatctgagcttccagcagtgcttctgagcagctgtagtaagcgtcctcccggctggctcgggagctcacagcgcttcccgggatccacttgctcgtcctggagctgccgcaactgtggccgtcccatccctggccctggagccgccccataccccttttgagagtgagactctcaaaaaacaaaaaaaagaaagaaactatgaactatggtccgggcatggtggcttatgcctgtaatcccagcactttggaaggccaaggcgggcagattgcttgagcccaggagtttgagaccagcctgggtaacatggtgaaaccccatctctacaaaaatacaaaacttagttagctaagagtggtggcacatgcctgtagtcccagctactagggaggctgagtggggaggatcacttgagcctgggaggcagagggtgaagtgagccaagatcatgctactgcactccagcctgggtgacagagaccttgtctcaaatagaaaaaaaaaaaggtggggggagggggaagaaagaaactgaatctaggatctaccacttatcaggggtgcaaccttttttttaagatggagtgttgccctgtgtcccaggctggagtgcagtggtgcaatcttggttcactgcaacctccgtcccctgggttcaagcgattctccttcctcagcctcctgagtagttgggattacaggcatgtgccacgacatccagctaatttttgtatttttagcagagacagggttggccaggctgctctcaaactcctgacttcaggtgatccgcctgtctcggcctcccaaagtgctaggattacaggcatgagccaccatgcccggccctagtgggtgcaaccttaagcaagacagaggatatttactttcctatatcgatatgagtcaagtgggatgaatcatgtgaaaatgcttagcagaggaccagtttaggtcaggtgctcaacatatcttagttgaatttggcaaattattcatctagactagtggttctcaatcagcaatggaatcacctggagggccttaaaccatagcttgctgggccccacctccagaatttctggctcttatctatgtaaagcgggtctgaaatttgcatttcaagcaagtttccaggtgttactgatactgctgatctgaggatcacacttaaccactgactataaactgataggtcaggtgtggtggcttcacacctgtaatctcagcaatttggaaggctaaggtgggaggaatttgagaccaccctgggcaacacagggagacctcacctctacaaaaaattagccagatgtgggggcacatacctgtagccctagctactcaactacccagctactcctactgaggtaggaggaccacttgagcccagcctgagcaacatagcaaaatcgtctctaaaacaaaacaggctgggcgcagtggctcacacctgtaatcccagcactttgggaggccaaggggggcggatcacaacgtcaggagatcaagaccatcctggccaatatagtgaaaccctgtctataccaaacatacaaagattagctggggtggtggcgcatgcctgtaatcccagctactcgggagtctgaggcataagaatcgcttgaaaccaggaggcggaagttgcagtgagccaagattgggccactgcactccggcctggagacagagcaagactgtcacaaaacaaaacagaggacaagaacaatctgcttgtttagtaaagcatgctcaatgcctaatatatagtttccagcacagcctaaagtgcaaatttttcagtgaataaaccactctgtgcctcagaataactgatatttactgtcaataatatgagaacaaacacttttgttcactgctctatttccagacccaagaacatggcttggcacacaatgtcagcgctcagtgggttcaccctgcctgctgccttgacaaagctgatttatcaagaccagggaattgcaatggagaaagagtaattcacgcagagccagctgtgtgggagaccagagttttattattacacaaattagtctccctgagcatttgaggatcagagttcttaaagataatttggcgagtaggagcttgggaagcggggagtgctgattggtcaggttgaagacggaatcacagggagtcaaagtgaggttttcttgctgttttctgttcctgggtggaatggcagaactgattgagccaggttactggtctaggtagtcagctgatccaatgagtgcagggtctgcaaaacatctcaagcactaatcttaggttttacaatagttatgttattcctaaaagcaatttggggaggttcagactcttggagcgagaggctgcatgtcccctaaactgtaatttgtaatcttgtagctaatttgttagtcctgtaaagacagactggtccccaggcaagaagggggtcttttcgggaaggggctattatcaattttgtttcaaaccataaactgaattcctccccaaagttagttccacctacacccaggaatgaataaggacagcttaaaggttagaagcaagatggagtcggttaagtctgatttcttccactatcataatttcctcagttgtaattttgcaaaggcagtttcaacagcagtgctcgaaaaattatgaaatcaacaaatagtactgaaaagttcaaatgaagtcatatatgaaaaagaaatcctagcactgttagctataattacttagccattaaatggggtactaataattactgcaggaactatcttttccaacagagcgcagagatcttttggctctgataaagctctgcacctaaacaaaggcgctgtataaaaatggttaataacaattgacctttactgagtgcttactatgatgccaagcggcctatgtggcctaatttcatcctctgggcattattatttccattttacaagctgtagagccagacctcagacccccacatgcaggttgacaacagttggtgccctttaccaccaccacacgttccgcaaatctcataaccagcaaacgccatgggtgagagcaacctagcggacggaaatcaacggggtcaggggtcaccaggaagtgactacaagactctagctcagaggtcactaatacgtcacaggcagagtgaaggggcattattaaagatagtttgacaaattctttttaatctcatttctgttggtgaggccataaagtgactggaacatctgaaaaaaaatgtcaggagggaaatacatacgactcagcagaggcgcacaggcggcggccatgatgggaagatgaaagaggcgcatgcgcggcatccgggtccccgaaatgcagacgtggcagaagaagtggcccggccctaaagcgtggaggaggaacttccgggggtgacgggacggccccctcggaaccggaagtggagcctgggagccttgacgttaggaacgaagtctaacctggatctggagccgggtgaggagtggcatcgggaggttggcgggtaggaaagcaaaggagaggtcagggtattactggccagattggggtccggtttcagaaagaagggaggagcctgggggcggggcctgggtagagaccctcacctcacgcatccaccatccaggagcaggtcctagaccatcccttcgtctcccggcccagattccggctcctgcttcctgccccgagcctgttaaaaggtgcaagacgtttggtctctgtgcttaacagagcagccccctctcttaacgtggccctagaagccgacttggcttctcggttttgatcctcggctctccgaggctccatggcttgactactttcagagttctaggaagcttgccccgcccccttgggttgtcaccctcgactatccacccagaatggagtcgagacttcagtctgactccaagctcttgaatgtgtttgaggggattattttctggagaagaagctcctttctttacccctccccccggctttggaaacataaagggagaggacatattttaaacttagtgtcagtgacctacctctgtaaggtttagggtttggaagaacagctattgagataactttgagtttaaagagttttagaccaggatcagctccttttctatagtcaaggtggcccttctagcaaagggggagaggtccattgttccctttgcagcaactctgagtgctcctgctttctgggccccttctgtctacaggataattggaatgatacagctgttgaaagtagatgtgatgagatagttttcttggaaggaccctgtttagaaaaggccctctaattcatccctgtgttgatgagcaagattgtaataattttgatggtggctgagattcataacaatcgtaaggggagcagaaacaggagagttggagaagtgcattggaatttagaatattcatagtcttctgcttgagggatgaggtgaatgatttttttccatgaaatctaactctaactttgcccctgattcttgaactgtttcctcagattatgtgaagaagttttggtgcctgttctgcacttggttttaatctgttaccttgctagagttttcaggtgtcctttattttttatttttttgaaagggcgtcttgctctattgctcaggctggagtgcagtggcacgatctcggcttattgcaatctccgcctcccgggttcaagcgatttctcctgcctcagcctcccaagtagctgggattacaggcgtgtgccaccatgcccggctagtttttgtatttttagtagagactgggtttcaccgtgttggccaggctggtcatgaactcctgacctcaagtgatctgcccgacttggccttccaaagtgctgggattacaggcatgagccactgtgcctggccaacttttattgattttaatgcttcggttttggccgggcgtggtggctcacacctgtgatcccagcactttgggaggccaaggtgggtggatcacgaggtcaggagatcgagaccagcctggctaacagggtgaaaacctgtctctactaaaaatacaaaaactagctgggtgtggtggcacgcgcctgtaatcccagctactcgggaggctgaggcaggagaatcgtttgaacccaggaggtgaaggttgcagtgagccgagatcgcgccactgcactccagcctggcaacagagtgagactccgtctcaaaaaaaaaaaaaaaaaaaaaaaaccttcagttttaaggtccatacactcttttggtggaaagacttgggttggagtatcatttgtattatggcagtttagctaaagaatgtcatttctgtaactcagcctaaattttgtcattgagggggaaggattttagcagatctgttttagatttttagcctgattgattttaaatcaattgttcagcacactagagggtactcgatgtttgctgaatgaatggatgctagagtgaatgaatggaaagtgggaacattgtttctttcacctgtaacatcaaggtagttcatcagccacaagactgtgtgactagacactagaaatcataccactggggaatggaggctgctgctccatttcagtggatctgtctgaagttgaaatttatactatttagacagtgacaaagggtggatggtcagaataacaaaatccttgcttttaggagataatctgaatgctggctggggcagaaaattactaagatcctgtggaagtgtgaggattattaaactgatcactgtctgataaggtcaatttctttttatctctacttcctgccctgaatagttgctctctttagaaagttcattttgactaatttctcctctctctcacaggtgagatcaaattgggaatgctttcataatgaacgtcaaccagtcagttccacctgtgccaccatttgggcagccccagcccatctacccagggtatcatcagtccagctatggtgggcaatcagggtccacagcccccgccattccctatggagcctacaatggcccagtaccaggctatcagcaaacacctccccaaggtatgtttctgtttctgtttcctttgagctagggagggaaatcagcagagtcttcaggttgggttgtattgctctagctaagctacctgagaagtttggataactgggattgaggaacataaatctggccctgtgtagctgagagccccgtgggcgcccttcccttccctttttttattattattttaatttttttttgagacagttttgctctgtcactcatgctggattacagtggcatgatctcaactcattgcaacctctgcctcctgggcttaagcacttctcctgcctcagcctccccagtagctgggattacaggcatgcaccaccacgtccagctaatttttgtatttttttaatttattttgagatagagtctctctctgtcgcccaggctggagtgcagtggcaccctcttggctgcaacctccaccttccaggttcaagcagttctctgcctcagcctcctgagtagctaggattacaggcatccaccaccacaccagctaatttttttgtctttttagtagagatgggggtttcaccatcttggccaggctggtcttgaactcctgaccttgtgatctgcccgcctcagcctcccaaagtgctgggattataggcgtgagctaccgtgcctggcctgtatttttttttttttttttttttgagacagagttttactcttgttgcccaggctgtagtgcagtggcacgatctcggctcaccacaacctccatctcctgggttcaagtgattctcctgcctcagcctcccgaataactgggattacaggcatgcaccaccataccctgctaattttgtatctttagtagagatggggtttctccatgttggtcaggctggtcttgaactcccaacctcaagtgatccacccacctcggactcccaaaatgctgagattacaggcgtgagccaccacacctggccactgtttgtatttttagtagagatggggttttaccagtggccaggaaggtcttgaagaactgctgacctcaaatgatccaccagccttggcctcccaaaatgctgggattacaggcttcagccaccacgcccggccccttccctgtttttttattttattttacttattttattatttatttatttatttattttttgagacagtctcgctctgttgcccaggctggagtgcagtggcacaatctcggctcactgcaacctccgcctcccagattcaagcaattctcctgcctcagcctccagagtagctgtgattacaggctcccgccaccatgcccggcattttttgtatttttagtagagacagtgttacaccatgttggccaggctggtctcgaactcctgacctcaaatgattcacccatctcggcttcccaaagtgctgacattacaggcatgagccaccacctctggccttatttttaatattttttgagatggaattttgctcttgttacccaggctggagtgcaatggcacaatctcagcttactgtaacctccgcctcccaggttcaagtgattctcctgcctcagcctcccaagtagctgggattacaggcatgtgccaccacacccggctaatgttttgtatttttattagagatggggtttcaccatgttggccaggctggtctcaaactcctggcctcaggtgatccacccgcctcagcctcccaaatgctgggattacaggtgtgagccaccgtacctggccttattttttttcttttttatttttgagctggagtttggctcttgttacccaggctggagtgcaatggcacaatctcagctcactgcaacctctgcctcccaggttcaagtgattctcgtgcctcagcctcctgagtagctgggatacaggcacccaccaccacacctggctaattttttgtatttttagtagagatgggattttgccatgttggccaggctggtctcgaactcctgacctcaggtgatccacttgcctcggcctctcaaagtgctaggattacaaacgtaagccaccacgcccagctgtcttccctgtttttagataaggtactgtgtttctgccttaagccatctagtgggaacacatctcccaggttcactgactgttcacttcctgtgggtatcaccttgtgcagccttacctggtcacattgttcagagctaaatggaagggttgtggtccacacccctctagatcctgtgaccaggaccgaatatttcctgttgacttgtagtctccttgaaataatttattcgtcatatatgttgagaaagcctcttgttggactgatgattcttatgtatgaatgaccctgggacagtgtagtttatgggggtgaaaagtgtgatatttgtgtgcctgacttttggtgcgtctcatgtcttctgatatccatccttttcctttgcttgagtttcctctgcttcttagatgctctgtaatgtcatggtaataagataatactaatctgatgctgttctaggttcagtgtttggcttttaaccttaccttttctttttctttttttttttttttctttttggagacagagtcttactctgtcacccaggctggagtgcagtggcacgatcttggctcattgtaacctctgtctcccgggttcaagcagttctcctgtctcagcctcccgaatagctgggattacaggcacatgccaccacgcccggctaatttttatatttttagtagagacagggtttcaccatgttggccaggctggtctcgaactcctgacttcgtgatccacctgccttggcctcccaaagtgctgggattacaggcgtgagccaccacgtccagccttaccttactttctcaagaagagcagctagtactctaccgattctccagaggggctttttggaaatagttaacagtagatctttgcttaggctagccgatgatttagggtatgccaaactctatgctttcataaagagatatggaaaaaagaaggcatcaaggaggtactggtaagatttgggaaataatgaagtatgatgattttaactgtggggaaaaaatattgtgatgagattaggccccaggtctttggaagaaccttaattctaagctgagactttggctggacagagtccacctctgctttgtcaagtgctcgagtttggcattctctcatgagaaagctttgttagaggaaaacatatctgattctgtcatggttggtgagcaagtttaggctaatcatgttcctgtaggcaggttctataatgtctaatctctactgagggcagagcaaaagaaaagcattctttgaacagaggtcatccacatttcaaaagtgatgtgccaagtaactaattgctttctccctgaacttcatatgtgaagaatggctaagggtagtgtaagtagctttggtggtggttctaaggaataggaaggatggagtacagcttttgtgaggacataggtggcaatgctgatgggaggacaggccagctgtccttactgaactgttgggcagaaacaaggtctccgatctataggaacacgttcctgaatcgtgctgtttcatgttttcacacttagaagtggatgaaaggatatagttagtgtaagcagaatgaatgaagaagaaggtggcagaataatctccccaagagatgcctttctttgcagcctagttccgtatattacttggtcatcttctgagtctcctttttcatatatgctccaagtttctgagttctggagtaagatcttttccttaaaagggttggcttgttgtctagggtaagaatatcaggcagtcttggattgactgagagtatggtgatcaaaggaaggccctacattcttgtgcctctggctacagcttcacccctagtatgcttgtctaggggagtgtaggccccttgttgggaatctgtgtttagaatactgctgtagctacagttgtatgctggtagtgtccttttcactgcctaaactgtggtattgggccagtgaaggtctgagtttattgatccttgctttgcattcctggctcagggtggaggagaaagttatttcccaatcacttagtttctgtcctttaccctcaggtatgtcaagagccccaccttcctcgggggcacctccagcctcaacagcacaggctccttgtggccaggctgcatatggccagtttggccaaggagatgtacagaatgggccaagctccactgttcagatgcaaaggtaggtacttggtcaatctaaaattggtctgatgaggctgagtgcagtggctcatgcctgtaatcccagcactttgggaggctgaggtgggtggatcacctgaggtcaggagtttgagaccagcctggccaacatggcaaaaccccatctcttttctcaaataaaaaattagccaggtgtggtggtgtgcacttgaaatcccagacttgggaggctgaggcagaagaatcatgaggcagaggttgccgtgagccgagatcgtgccattgcactccagcctgggcgatagagtgagactccgtctcataaataaataaataaataaataaataaaattgatctgatgaaagtagaaaggttaggaatgtatgggggtttgtgttttgttttgttttttttctctcctttgcctttcttgtagatcactttttctcttccctctacccttttgtactttgtcttcttttttccaggttacaggtactgctgacgtccagccctgtggattattgacccatcttagtacctgggttcctttgcatattcttcattttctgtgaacttgagtttcttgctttactagacatacatcttcaataatggttgcagtcctgttgagactaccctaagggagaaatgggaagaggaaacttcaggattatttgcatctcttttgacttgcccctttcctctagaacaggcacttagtaggactgattggttaagtttgggcatggccagttatgaactgaaagatactaaaagggaaaccacataaatggtgaaaacttcagtggtacagtgacccaataaacccatcttagcatgaaagtccattaaaggagggcagtcatctctattagagtgctttttaaaattttttaatttttttttttgagacagggtctcactccgtggcccaagctagagtgcagtggcaggatcacaactccctggagcctggatgtctcaggctcaggtgaccctcccacctcagtttcccaggtagctgggactacaggcatgcgccaccacacccagctaattttttgtatttttagtagagatggggtttcgctgtgttgcccaggctgatctcaaaactcctgagctcaagcaatctgcccaccttggcctcccaaagtgctaggattacaggagtgagccactgcacctggtcaggagtgttgtttgtgtttggtaaataaagagtaaaatataactgtgggaaaggggtatgataatagaaaagtcactttctgacactttaactgggtgtccagaacacacattttaagcattgaatgtaagcctgggtaagtcaaacaagtggggtacatagaagataacaagtacacaaatgtacataaagttataaaacagggtgaggatatagtgagggggtagggagctgttttaaatacattggtccgtgctgggtgcagtggctgactcctttaataccagcacttggggaggctgaggtgggaggattgcttgagctcacaagttgaaggctgcagtgagccatgattgtactgctgcactccagtctaggtgacaaagcaagaccctgtcacaaaaaaacaaaacaaaacaaaaaacccatacgaaacaagcatatgccttagtaaattattatatagcaaactcctttgtaactacaactacgacccagatgaagaaatagaactttgccactcaccccaaaagccttttccatgtgccccaattcaaacattattctctccctcccctcataaataacaactatcctgcattatcctgactcttacagtaattactttctttttctttttttttgagacagagtcctgccctgttgcccatgctagaatgcagtggtgtgatctcggttcactacactctccagctcctgggttcaggcgattctccagcctcagcctcccgagtagctgggattgcaggcgcctgccatcaggcatggctaatttttttatatttttagtagagacagggtttcgccatgttggacaggctggtctcgaactcctgacctcaagtgatccacccgcctcagccttccaaagtgctgggattacaggtgtgagccaccacgcccagctgactttcttgtggttttttaaaaatagtttacacttggctgggtgaggtggctcatgcctataatcccagcactttgggaggccaaggtgagaagattgcttcagcccagatttttgagaccagcctgtgcaatatagggagaccccaatctctacaaaaaataaaatgttagctgggcatggtggcaagcttgttgtcctagctactttgggaggctgaagtggaggtatcgtttgggcccaaaaggtcgaggctacactgagtgtgatctcgccactgcactccagagcttgagaaacagcgagactgtgtctcacaaagaaaaagtttacactcaaatgtacaaccccacgtaccacaatttagttttacccacaggaaaaacacttggtgtgtcttaagtctataagctccacctctgtcttctttttcttagtatttatctgttgaagaaaacagttaacccaaagaatttcccacagtttggactctttacataacatttacatcacacttgtccaacttgtggcccacagtctgcgtgccccaggacggctttgaatgtggtccaacacaaattcataaacttccttaaaacattatgaggtttttttttttaagttcattacctgtcattagtgtagtgttagtgtattttatgtgtggcccaagacacttcttccagtatagcccagggaagccaaaagattggacacccctgatttacattgtattaggtattataagtaatctagagatgatttaaagtacatgggaggaggctgggtgtggtggcttatacctgtaattccagcactttgggaggccaaggtgggtggatcacctgaggtaaggagtttgagaccagcctggctaacatggtgaaaccccatctctactaaaaatacaaaaattagctgggtgtggtggcgggcacctataatctcagctacttgggaggctgaggcaggagaatcgcttgaacccaggaggcagaggttgcagtgagccaagattgtgccactgcactccatcctgggcgacagagtgagacttcgtctcaggaaaaaaaaagtatatgggaggttatatgcaaatatgatgccgtataacccacatccaattctattgattccaccttcaagatgtatcccaaatctcactacagtcattcctcagtatccatgggggaatggttccaggacctcccctgaccaacagataccaaaatccacaaaggctcaagtccctcatataaactctattcaagtagagatgttaggtaggcaggtgcatatacaaatctgcagctcaagactgatgctaggactggagataaaaatttgggagtcctcagtctatagatatttaaagccgtgggactagatgaaatcatttaaaaagtgagtattgagattaaagaatggaattgaggactgagacttggagcttagcaacatttaaaagtaaagaggagccgccattaaaagacaatgaggggccaggtgcagtgcctcactcctgtaatcccagcactttgggaggctgaggcaggcagattgcttgagctcaggagttcgagacaagcctgggcaacatggtgaaaccctgtctctaccaaaatactaaaattagccgggtgtggtggcacatgcctgtggtcccagcttcttgggaggctgaggtgggaggatggcttgaaaccaagaggcggaggttgcagtgagccgaaatcgcaccgctgcactccaacctgaatgacagagtaagaccccatctcaaacaaacaaaaaaaaaacaaaagacaatgagaaagagcagtagtgaggtgggagataagccgggagagtgtggtgtcctgaagtcaggtgaagagagtatttcaagaaggtgagagagtaatcagttgtgtcagatgctgccaaattgtaagatgaagatggagaattgaccattgaatttggcaaggttggcgtcattggtaaaggcagtttcagtgtagagataaagaaaactacccagttggagtgagtcagagtttcaggccaggcgcggtggctcatgcctgtaattccagcactttgggaggccgaggcgggtggattacaaggtcaggagatcgagaccatcctggctaacacggtgaaaccccgtctctactaaaaatacaaaaaattagctgggcgcggtggcaggctcctatagtcacagctacttggggggctgaggcaggagaatggcgtgaacccaggaggcagagcttgcagtgagccgagatcttgccactgcactccagcctgggcgacagacagcgagactccgtctcaggaaaaaaaaaaagtttcaaccgggtggtagattgacataatctgaaaaccctctgctaccaaagtctagaaaggagagagaaaatagaaacaaaaaaaatttttaagtgcaaagttaagcttgaaagaaaatgtgaaattcttaagttttagagaccaagtgaggactgaaaatctttttttttttttaaatacagagtcttgctctgtcgcccaggctggagtgcagtggcacgatctctgctcactgcaacctctacctcccaggttcaagcgattcccctgcctcagcctcccaagtagctgggactacagatgtgggccaccatgcccggctaatttttgtatttttagtagagatgaggtttcaccgtgttggccaggctggtctcaaactcctcgcctcaggtgaaccgcccaccttggcctcccaaagtggtgggattacaggcatgggccactgtgcctggccatcaagtgaggactgaaaatcagagtggtaaattgactctggagctgcctgtagattgggtggattcatcatcttgagaagccagggccttaaatttaagcaggtactggggaaggcagatgagtccttgggctttcctgagagtagttttggaactgagacattgtttataaagtctggacctgggctgcaccttcattgaacaagctgactaggggaaaaaagtctgcacgctggaaaggggagataaggagtgctgtttctctcaggctggctgtggatgggtgaaaaaaaaagttcttgggactgcaaatggacatgacatctttttggaatgatgaaaatgttttaaaatttgattctggtgatggttgcataactaaatttactaaaaatcattgaattgttcacttgaagtgaatttaatggtatggaaattacatctcagtaatatttttttttttttgagacagagttttggtcttattgcccaggttggagtgcaatagcacgatctcagctcactgcagcctctgcctcctgggttcaagtgattctcctgcctcagcctcccaagtagctgggattccaggcatgaccaccatgccaggctaattttttgtatttttagtagagacagggtttcaccatgttggccaggctggtcttgaactgacctcaagtgattcacctgtgttggcctcccaaagttctgggattacaggtgtgagtcactgttcctggccaatttttttttttttttttttttttttttttgagatgaagtctcgctctgtcacccaggctggagtgaagtggtgtgaccttggctcactgcaacctccacctcccaggttcaagtgaatctcctgtctgaacctcttgagtagctgggattacaggtgtgcactaccacgcctgggctaatttttgtatttttttagtagagatggagtttcaccatgttggtcaggctggtcttgaactcctgacctcaaatgatccatctgtctcggcctcccaaagtactgggattacaggcatgagccactgcacctggcctaattttttttttttttaaattagaggccaggtgcagtggctcatgcctgtagtaatctcaacaccttgggaggctgagacaggaggatcacttgaggccagaagttttagaccagcctgggcaacatagggagatcctgtcgctataaaaaaaaaaaaatagctgagcattgttggtgtgcctgggaagcagaggtggaggcaggaggattgctagagccctggaggttgaggctacagtgagccatgatggcttcgctgcactgtggcctgggtgccagagtgagaccctgtctcaaaaactaaaaaaaaaaaaaaatcaatctagggtgacactgtcattattggagtaccttctggaaacaaatgtagaacaaccacacctcagtccgggctggaagggattatcggagaaaggcactttgattagagttgggccaggcacagtgctcatgtttgtaatcccagcactttgtgaagccggggtaggagttcaagactatcctgggcagcatagcaagaccctgtctctacaaaaaataaaaaaaattagctaggtgtggtggtgtgtgcctgtggtctcagatacttgggaggggaggcttagggggaggattgcttgagcccaggaggtcaaggctgcagtgagccacagatagtgagtgccattgtactccagcctgggtgacagagcgagaccctgtctcaaaaaaaaaaaaaaaaaaaaaaaaaaaacgtaaggctgggcacggtggctcacgcctgtaatcccagcactttgggaggttgaggcgggcgaatcacgaggtcaggagttccgagaccagcccggccaacatagtgaaaccccgtctctactaaaaatacaaaaattagccaggcatgatggtgggcacctgtagtcccagctactcgggaggctaaggcaggagaattgcttgaacccaggaggtggaggttgtgatgggccaagatcgcaccactgcactccagcctgggcgacagagtgagactctgtctcaaaagaaaagaaaagaaaaaaaaaagtagagacagagtatagacctattcttttgtaatgtttagctaaaaggggagcaaaagtttgagggggctgtgaggtaatttggttggatttttaaaaagttttttgagatataattcatatactgtgcaattcgtctgtttaaagtgtttttgtatatttagtggtttttaatatattgacagatatgtgctgtcacaatttagtatattgacagatatcactacagtcagttttagaacattttcatcatctgaagaagaaatactgcattctttaactacccctgtttagctattcccccattcccctattcttccaaccttaagcaactcctgatctactttctgtctctaaagatttccctattctggacttttcattagaatagaatcatatactatgtgatattttataactgacttctttaatttagcataatattttcaaagttcaactatgttgtagtgtatattagtactccattcctttttgtggttaagtggtttttcattgtgtagctacatgccacattttgtttatccattcttctgctgatagacatttgggatgtttccactatagttggtttttgtgtgtgtgtgtgtgtgtgtgagatgtttgtatgtttttgtgctgatgggaataatcagagagggagacactgaatggaaagtatattggaaagacactgtggtagactgaggcgggcagattcgttgagctcaggagtttgagaccagcctaggcaacatggcgagactccgtatctataaaaaatgcgaaaactagccacgcatggtggcgtgtgactttcgtttcagctacttgagaggctgaggtgggaagatcagctgagcctggaaagttgaggctgcaatgagctgtgatcacaccactgcacttcagcctgggtggcagagtgagaccctgtctcaaaaaaaaaaaaaagctggacaatcaatctgcatttgtttgatttcatatttattaaggttcatgcatgcttatgcgtgccttccctttcagtgctttcagggcttcagattacaaaactgaagaggtttgtcaaagaattgaagcagaggaagcagtaatttagttagcagagtaaatagtacttgacctgaaggtgcttggtttatgtttgtggagtgagcttaatggaaaacaagatttgccatgaataatcaggaatataatttacccacaaatatacaaaagtatgaagccataaaagaactcagggtgtgagagtaagatgtcacaaaacaatgtagcttcctgtatgatgtgacacttctgtagacttcaaagggtgtcctggccccactagtcacctctgcttgctttcttttcacaggctgcctgggtctcagccatttgggtccccattggcccctgtgggcaaccagccacctgtgcttcagccctatggccctcccccgacaagtgcacaggtggctacgcagctgtctggaatgcagatcagcggtgctgtggccccagcccctccttcttcagggctgggctttggtgagtggctgtgaacacaggaatgttactgtcccctgttcagaggcatcagactctggggttatacctgaatctcttttatttcccttgtatttcctgtgcctctgagcctcagaagatgggacagtcatatttgcccctcttgtgtggaaagggaagtgatataccgaacaaggaggcagaatgactgggcttttgactctacctttattctacttctcaggcccaccaacatcgctggcttcagcctcaggaagtttccctaactctggtctgtatggctcctatcctcagggccaggctcctccccttagccaggcccaaggtcatcctgggatccagactccccagcgatctgccccatcacaggcctccagcttcacacccccagcttcagggggtcctcggctgccttcgatgactggtccactcctgcctggacagagttttggagggccctcagtgagccagcccaaccatgtgtcttcacctcctcaagctctgccccctggcacccagatgactgggcccctgggaccactgccacctatgcactccccgcagcagccaggctatcagccccaacaaaatggtgagtctttcccaaggtctgtcttagaagctagaggcttcagctactcaggtggtttttgatgttttttatttgtttgtttttagtattacttgctaagtggtgaattagatgggtagcttcagggtattattcctaggatatggggtttgtaagacattattttttcttgtcgttctgataacatggtatttttctgaatgtctttgccaggcattagtgtgcctcataattctatgtttttaggagtctagtcattttcctgaggccttaagaagagatagggatgggattttgagttcatcaaccttgtgtccttgtctcaggttccttcggaccagcccggggccctcagtctaattatggaggcccctacccagcagcacccacctttggcagtcagcctgggcctcctcagccactgcctcctaagcgcctggaccctgatgccatcccaagccctgtaagtagaaactttcatggtcctgaggaagggtttgtgtctgccagataggcaggtcaatctagatgaaatgtttgcctagcattttctgataattttccctttttgttcatcttcttggagaacttacatataatttgattctgaactggaacttgaggttctaggagtcttttggggggctgttttactctatagctgggcagagaaggaagggaaaccaagagtgagcagcagcaccagtagatgtctgagggctgcactctgtcactactgtacatacatagtatagtagcctttgtccttctgtggagcagtgactgggtcttgtccccttagatctagaaggatggcattcttcctaatgggtagagcaggtgggaattctctgatgttagatgttaagagaaggaaagcctcactggtttctctgctcttacttggacagttttaggaggaagtccccagtacttttgtttggtaggcttctgctgtgtggatggggaagagtgaacgacagtttatgagggcagtgtgtatgtaaagtcccactggagagctgcttttttcaggaagagggtgaattgcacccttggagccatcagaatcctcaggccctccttatcagactcagaatagagactaggactgtactgccaagtaggggccactttatagttccacctgtaacatttgctatgtcagttaccttgccatgcttagccattgtcatattccattctgttctcgtccctcttcctcctttgggtaaccaacacagtgagggagcctgttggccaaggagaactcaagaggattaagcagcctctccttccttccccctccttcagtgagaaggagagtctggttggacatgaagggaggcttctttcagcataagatagtccttagaatgggaggtttggccttttagggggaacactcctcttcttcttccttaaggtttcttccattcagcctcagcccctccctgtgtaactcctgcttgcctcctgtttgcccctttccttatctttctacatcatagtctgagccattaaagcctctgtgttgggccagaaagacttggaatttcatatctagagggggcttgatttcagcaatatgagctgggctccagctgttcatgtctaactcaacagggttgagagaagtaacatctgcctcttgttcttttgtctccctccttgtattcccctgctgcatttattattaaaacactaaaagcaactcagtgagctgcctcctcagcagaaaaccaggcacagaatagaccccgatgccattcctagtccagtaagtgcagggggtgggtgtttgtgcatgtcattcctgtgttagtgccatccatgcatgcctgtgacctcatcttcacctcatctaccatgtccattcctccccattctcttcctttagcctagcccttctagatactcacttatacaagataaaaggatatgcatgcctcaagtcaccaggtaatgaagaggtagcaagctgtttgccttgagtatggggtggtggaaggtcaggctctaagggtggggtcaggtggcatgtcaagctttggctttagttctgctggcacctccaggagcctgcaggtgatgtatgatggaagaggacaaagttgaacggtagatcattccactttggatttgatttgtctgtagcctgttgtggagaaatattggagtaggaatgtacagattcatagtatcccaaactggcatttcttacaggagaagggactgctggtttgggaaagtgtgggtgctttctcatctgaagagtctttttgactctgatatatttctaagcttcaacctttctgctatgggatagagtcttatttgccctttgctttttctggttttccaaacccatcttgaagtaactgaccaaaggtcattagcctgcataaaggtctgaataccagctttgcaggtcctttattttcctttgctgagtctgtcaaaatgtggaggactgaggattgagctataaggattgggtacttctcctctcctcctatatatacacattgatgcttacctgaaagtaaggcagcatctgcttcctcaccttacttgatcatttctggctgtttaaatctctcctcaccctgtcccttgtaatttcattgagtgtagagtcattccaggtagattcatttttacgtggttactgttgtctgttttcctgctctgactcagaatgtgtcttggggagaggatcggggaaggcatgatgggggaggggaatggaatctaatcatgtttgaaggtttgtgatcagagctggggcttttcctggaatgggaggaatgagagggtgttcaccattgatggggggtagggggcaattcataaagaagcccattctcatgttgcctgcccagcaggctgctgggagtgaaagattggctgctgtagagtgtaagattggcattacagcattttatatgatctccagaaggagaacaggcctggtgtatgaggtgttccttggcaaatttttagtttttgtgttacagctctagcctttttcactcttggcactctgggacctcacacttcctttttcttctgtcacctcattcattgcacttctctgcagattcaggtcattgaagatgacaggaacaaccggggtacagagccatttgttactggagtacggggccaggtgccacccttagtcactaccaacttcctggtgaaagaccaaggtgagaatggaattagctcctcccacaggggctttttcttcaagattatcagcttatggttggggcttttttttttttttttttttttttttttttttagtttttaaccagagacaagttccctctagtccctctgggggaaaaagccaccatcacctctagctttgtggagttgatggtgtggatcaccaatggagagctggtgtctggaaggattctgtgatctgactcgggtcttctgcctccttcttcagggaatgcaagtccccgatacatccgatgtacatcctataatatcccttgcacatctgacatggctaagcaggctcaggtgcccctggcagcagtcatcaaaccgctggcaaggctgcccccagaggaggtgagtcagggaaggggctagagtgtaatgaaagggagggaggtagagaggggtctaaagcgtcttcctggatgtgattccagcttcacaatggaagatattttagttaggcaggagaggagactgtctttagtggctttctatcccagggcccatgcctggagaggggatggtagggatgagagcaaaagcccaagacattgctgagaaggaacagagtctctagaggaaacaagcaggatgaaaagaggtagggccaggccaggcgcagtggctcacgcctgtaatcccagcactttgggaggctgaggcgggtggatcacgaggacaggagatcaagaccatcctggctaacacggtgaaaccccgtctctatgaaaaatacaaaaaattagccgggcgtggtggcgggcgcctgtagtcccagctacttgggagactgaggcaggagaatggcgtgaacccgggaggcagagcttgcagtgaggcgagattgcaccactgcactccagcctgggcaacagagcgagactctgtctcaaaaaaaaaaaaaaaaacaagaggtagggccaaattgtaggggagaagacagctgaatgtaggaacctctcgtatcatggtcatctccagatgatgagaaggacatcattccatgttttcctgactgtcctgtcatcccaggttagtgctgttagaacagcatataagagaaaaggtagattaggatccagtgatccttctgtcacctgttttgggacctgatctgtcaccccagtacctgataccagcatgaagagagcgagccaggcagctgctccaccaggccttggtaggatactcatattcagccttgcttatcttacgatagggttctctgttactagaagccaaaggctcagtttatattctgcttatctctccgtctttctctgtgtgtttgtctatttctatctgggtcccattggggatagttgggcactggtctcttatgtgtagggtgacatttgcctggggcatcagtaactggcacagaatcccagggatacgggaggaggtgttacagatatttggttagggaaggagctggaatcaagattcttagagcaagagtgaagggcattagagatggggccagaaaggagaatcctagataatcttggctttctccctcatatgcccatggcagcccctagtctgatatggccggttttgcatttcctcttctctttcagtgagaaatgcagctctgggggtgggatgtaggaagagggaactatataatttttactcatagggacattttcctgtgatttgtctttactccctttcatcattgtgctccctactccctctgcagacagaatatctgcgccatgcgccttcttcctccggttgttcttcctcatctcctggctgaacctactgtggttttcctttatgtctgatcccttcccctttgcgccttaggcttcaccgtatgttgtggaccatggggaatctggccctttgcgctgcaaccgctgcaaagcatacatgtgtcccttcatgcagttcattgaaggagggaggcgtttccagtgctgtttttgcagctgtatcaatgatggtatgttcatggaagctgggatttgggggaaggtcttgattgtatcttccttgttctctattaaatagttagagagatgagggtccatctttcaggagctggggaagtagggcacatgggaatgagggatagtggtgtgagctcagctagggccagaatactaagattgaaactggatcttcgagtaacacactgccatgcttcccacagttcccccccagtattttcagcacctggatcataccggcaaacgtgtggatgcttatgaccgccctgagctatccctgggctcttatgaattcttggccactgtagattactgcaaggtgagggaaggtagcatgggaggagcagtgagtggaggataatgagacagctgagaatggctgttatcatttccctcaccccttttttgtccctttttgatgctgacttctctatagtcaactggcctgcttaccattccccctctccccaacattttcttcctctgcagaacaataagttccccagccctcctgcctttatcttcatgattgacgtctcctacaatgccatcaggactggtcttgttaggctcctctgtgaggagctcaagtcactgttagactttctacctaggtgagagttacagaactgaggtgtttcctgaggttaatgatagggtgtctgggttgactgaagaaatgtagcttggtgtcatgaagttgtgggtggtggaaaaggtggcaagtctaggtaacaatgtcaccttctacagggagggtggggcagaagagtcagcaatccgcgttggctttgtcacctacaataaggtgctccacttctataatgtgaagagctcattggcccagccacagatgatggttgtgtctgatgtggctgacatgtttgtgccactgctggatggcttcctggtcaacgtcaatgagtctcgggcagttatcaccaggtaagagccagattgtggaggtaaaggttgggggtggcatgggtaccaccatagaaggtcatggagttgaacagaggtattggacagtagatggaaaggggttgtggcccaggagttgtcagattctagaggcttgatgactcttcagggaatcgagaactgaggtatctggaatctgtatagcaattttggttgttttccgtcacctatctctttagcttattggatcagattccagaaatgtttgcagacacaagggaaacagagacagtatttgtaccagttatccaggctggaatggaggctctgaaggtaaggctggagtatcgggcaacctcctctaactccattttcctctgaccatcttatcccctgggatacaacctctctttcttcagtagtgggtgactgtccagtgtgttagactgtctgacatagctggtgcttaataaatgacaagggaagagatggatgaataaagaataaacaagtagtcctctcttttttcctaggctgctgagtgtgcagggaagctctttctattccatacatccctgcccattgcagaggccccagggaaactgaagaacagagatgacaggaagctgatcaatacagacaaggagaaggtgtgggactggaaaatgggggaggggaaggatttttcattacagaggaagtggggactctactttcttgatggtggctaggaccagacactccaccctttcaaataccatatctgtgactgccaacctccactgctgccatacttctctactccatctgatgccaaagctgttggtagactcttgtatttatttattttttaaagaagaacttttggccgggcatgatggctcatgcctgtaatccgagcgctttgggaggccaaggcgggcagatttttgaggccagaagtttgagaccagcctgactaacatggcaaaaccccgtctctactaaaaatacaaaaattagccaggtgtggtggcacacacctgtaatcccagctacttgggagtctgaggcaggagaatcgcttgaacctgggaggcagaggttgcagtgagctgagatcatgccactctatgccagcctgggtgacagagtgagaccctgtctcaaaaaaataaaaataatataaaagaaaattttttactattggaaaatccttggaagtagatctgaagtcttccatgaatttgaatatcccatgctagatatacagttttcaaatagggcggagctgagatatttgaacattttcttctccccattttctttccccctagactctgttccagcctcagacaggtgcctatcagaccctggccaaagagtgtgtggcccaaggctgctgtgtagatctctttctcttccctaaccagtatgtggatgtggccacactctctgttgtgccccagctcactggtggctctgtctacaaatatgcttcctttcaggtatggtgtgggatttggggcagcaggtggcagcagggctgggaatatctgcttatatatgcagtggctgactcattaatagaaatagtgttggggccaggcacggtgcctcacacctgtaatcctagcactttgggaggctgaggcaggcagatcacctgaggtcaggagttcaagaccagcctggccaacatggcaaaaccccatctctacgaaaaatacaaaaattagtcgggtgtggtggcgggcgcctgtaatcccagctactcaggaagctaagaatcccttgaacccgggaggtggaggttgtggtgagccgagattgcgccactgcactccagccagagcgacagagtaagactccgtctccaaaaaagaagaaatagtgttggaagagaagactgcatagtctgaagaagtgagcccgagaatgtggcagttaggaacatgggccttggaatcagtcctgcattgatattctggccccaccacttactagctacatgacctaggataaatttcttaagtacttcctcttttgttccttcatctgcaaaatggtgttaaaatacttaagtaggatttgtcaacagaattaaataattatatgtaaagcactctgtgtggtacctggcatgcagtctaagtgtttaaaagctattattgtcatcatcattatcatcctcactgttatgatgatgataattaggtggccttgtagagtggaaggggtacagggagattgtctgcacgatgagctatgtctagtcagtgacatgactctggacctgggggcctgcaggtggagaacgaccaggagcggttcctgagtgacctgcgtcgtgatgtccagaaggttgttggctttgatgctgtgatgcgggtccggacaagcactggtcagtcctgattgaagagcaggttggggggctaaatatggaagggaggcatgtggcacttgtcatactttttgccctgaccctgtccatgtggcctcaggtatccgtgctgtagatttctttggagctttctacatgagcaacacgacagatgtggagctggctgggctagatggggacaaaacagtgactgtggagttcaagcatgacgatcggctcaatgaagagagcggagctctcctgcaggtggcaggcgggaggcggggctgggcaggaagtgtttcattcgcttggtatagaagagggtgaggaatgggtagagagcactaaaagaagagacagggcacgggagtggctcatttctctcttccagtttaatagtgtagcaaagggcctttgtgagggaggggtgtgagttccccctttctcctttcccctagtgtgccctgctttacaccagctgtgcagggcagcgtcggctccgcatccataatctggccctgaactgctgcacccagctggctgatctatatcgaaactgtgagactgacacgctcatcaactacatggccaagtttggtgagggtagaagcagggcagggtgggattggggctgagaggtccaggatggtgagtgggtagttgtgatggtgggaatgcacacatgatgggcagctgaccagtgactatctttgctttcccatccagcatatcggggagtcctgaatagccctgtgaaggctgttcgtgacacgctcatcacccagtgtgcccagatcctggcctgttacagaaagaactgtgctagcccctcctctgcaggacaggtggggcaagtatattagtgggaggtggggttgttgggacaaatgtttgcatttgggagggatttctcatgatcattgactttattttgataatcccctcagttgatccttcctgagtgcatgaagctactcccagtttacctgaactgtgtgttgaagagtgatgtcctgcagcctggagctgaagtcactactgatgaccgtgcctatgtccgacagctagttacctccatggatgtgactgagaccaatgtcttcttctaccctcggctcttacctttggtgcgattgagggttggagtatgagatcttgcacggagcaaagggcctcttaggaggaggaaaggataggctagtatcagtcagacactagtggaatttgtttttatgtattttagctgatgtaattttcacactgagagagttactgagaccccagaaggggtggtgtctgaggacttagctttcaaaattttgtgtgtggtgcgggggggcagacttgtcttatggtccttggtaaccttttgctcccttccttttgtctagacaaagtctcccgttgagagtactaccgaaccaccagcagttcgagcctctgaagagcgtctaagcaatggggatatatatttactggagaatgggctcaacctcttcctctgggtgggagcaagcgtccaacagggtgttgtccagagccttttcagcgtctcctccttcagtcagatcaccagtggtttggtgagggcagggagtcaaggagaatatgggtgtggaagtatactttgtgaaacaattgggagccaatatagttagtgtgctagtaccctcaaatatcagggaacacttggggacaagggcagttgctgtcattcttcccaggtttgcctgtttcagatgatgcatacatgtatgctgccccaccttgactgaactcagagtgccttaccataaggataaatgaattttgtgttctagagtgttctgccagttctggataatccactgtccaagaaggttcgaggcctcattgatagcttacgggcacagagatcccggtacatgaaggtaacactgatctgaaccctggatttcttaccttgtcaagtcctcacctagaagtgggggttgggtggggaatgagtaagtgactgcctaatgagatttctgggcatgtttaatttcctttggccttgccttatgaaccctgaattctggccgtagcttaccgtggtgaaacaggaagacaagatggagatgctgttcaagcacttcctggtggaagacaagagtctgagtgggggagcatcttatgtggactttctctgtcatatgcacaaggagattcggcagctactgagctaaagcaagtgggtaaatggcatagggcccaggctagcttccagaaagcaccccaggatgtcagagaaattgggacagtaacatatcttatgtaagctgacctcagtctctctggggggagggggagatataaggagacaccttctttctgggctcaagtatcctgccactctgtcatgtcctgctgatggaaggtgcccctgttccctcattctaccctctttttcctgctaatcctgtcataatgaatgtagcttctcagttcactgtatatgattcggtattgggggtttggaggcacccagaccctggcaatattatgtgtccctttggaccagtctcccaagaggagaggggcaggcaggaaagagtggggatcctaaggttactacagggggctcagtgtcatccacaacttcctatattagggataaaacatataggtgcacaagagctggggtatagcccataggtggtggagagaaaagtggtcagtccttcttgggcctggaggttagcagtcaagtttctctgctttcactgctcgctcgctctctcctgcaatgattgatgatcactccgtggatagagaggcacactgtcagaggtgaccggagaactgagttgcaaaatatattaagatctggtagaggtaccagcttcctttccagctggagaggccccaacactggatggttctgtagggagcctagggagcctggtcatcaacttgcaatacctcacagagccagttcacatcccactctgagctcccacgagaaacactgcttctccaggcccggggttgttggggagagaggcagaggcagctggagcgccgttctctcctgctgggacaccgcttgggctttggtattgactgagtggctgacagttatcttccaaccccaactggcttgggggcaggacaagggctaggcttgatggtggccaggcttgcctgctccccacctgggatgcccctgctctggacctctcatttctcttcattggtttatttttcaatgcatctttaatttgtaaagaaataaaataaattaagatgtaaccattagcctcatctttactcccgaaagctcactttgcttttagtcctggccgtcggctgagcgagctgcgcatgcgccacgtgcccccgtggcgtagggcctcgtccggtcacgactatccgctgggcggggtcggtgctggccgagggggcgccggctgccggagtggacatggcggccggccccattagggtggtgttggtccttctaggggtgctcagtgtctgtgcagccagcggccatgggtccgtagcggagagggaggccggcggggaggcggagtgggcggaaccgtgggatggcgcggttttccggccgccctcggcgctgggcgcagtgggggtgacgcgcagctctgggacgccgcggccagggagggaggaggcgggggacttgccggtactgctgtggtggagcccagggctattcccccacttcccgggagactcggagcgcatcgagtgtgcgcgcggcgcgtgcgtggcgtcccggaaccgccgagcgctgagggactcgcggacgcgcgcgctgctcttctacggcacagacttccgcgcgtcggccgccccgctgccgcgcctggcgcaccagagctgggcgctcctccacgaggagtcgcccctcaacaacttcttgctgagccacggcccgggcatccgcctcttcaatcttacctccaccttcagtcgccactcggattacccgctgtcgctgcagtggctgcccgggaccgcctatctgcgccgcccggtgcctccgcccatggaacgcgcggagtggcgccgccgcggctacgcgccgctgctctatctgcagtcacactgcgacgtgccagcggaccgggaccgctacgtgcgcgagctcatgcgccacatcccggtgagtgagggcgggccggagggaaggaaaaggagagggcgggttgaggccaggactccaggtgtccaggactccaggtgtccaggactccaggtgtccaggcctccagggccgcaccctcatgacagccttactgtacccggtctaggtagactcctacgggaaatgcctgcagaatcgggagctgcctaccgcgcggctacaggacacagccacggccaccaccgaggatccagagctcttggctttcttgtcccgctataagttccacttggccctggaaaatgccatctgtaacgactacatgacagaaaaactgtggcgtcccatgcacctgggcgctgtgcccgtgtaccgcggttctccctctgtgagggactggatgccgaacaatcactccgtcatcctgattgatgattttgagtctcctcagaagctggcagagtttattgactttctggacaagaatgatgaggagtatatgaaatacctggcatacaagcaacctgggggcatcaccaaccaatttcttctggatagtctgaagcatcgggagtggggagtgaatgatcctttgctgcctaactacctcaacggcttcgagtgtttcgtctgtgactacgaactggctcggctggatgccgagaaagcccacgcggcctctcccggggacagccccgtctttgagccccacattgcccagccctcacacatggactgcccagtgcccacacctggctttggcaatgtggaagagattcctgagaatgacaggtaagagtgctggggtcccctgcagctatcaaatcatttacttacttgcttactgtgggcaattaagtagcactaggtgctgagcaggtgcaggaggaaattatcacatgggctcattctgtatttaaggtgtcaacagtctagttggggggataagacaagctgaaaaagctgaatagatgtaaaatataattcaaggcaacgtatgaaaatcagcttatgtgaacaatgtttccagtagtggttcaaaaagattgaaccagagtacagggcctgtgcagacaggggagagagaaaatggggcaaataaatagggacaaggctataaatatcattaataccaggttcaggagtttgcactgcactaaaaatcaactcagctatttgagcaccttttatagagtggaaatggggttgggcagtagagaagagcacttttagagaggcttttctgcagtagtcaggggttacacctgttaaccagccataatttttttttttaagcggctgtgctgaggatgagccccatgtagttggtgcaggtggggacacactgcctgtgtaactagaaaaactaggcatggccgggcacggtggctcacacctgtaatcccagcactttgggaggtcaaggggggaggaacacttgaggccagagacaatataatatataatataatatattgaccagcctggacaatataataagagcctctctgtacaatttaaaaactaaaagcctggggtggtggcacatacctgtagtcctggctacttgggaggctgtggcaggtggattgcttgaacctaggagttcaatgctgtagtgagctaggatcgtgccactgcattccagcctgggttggagtaagaccctgtcacacacacacacacacacaaaacaatgcacaatgcgcatcagaagggaagcgaataggctactgtagtaggtggcaaaaggtggtggtactgggaaacaaggccagcgtgtggtgtggggtgggaaaatgttgaaaccacttgtagcaagccacacctattgggggagaggtgataagattattaagctgaagtaaggctgctagaatggcctatagaaaccgacttggacagtggatggcagcagaaggccatttattaacagatgctgctggcagttttgtcctgatggttggaatccttcaccaagtaatttgtatctaattacaaattgtttgtatctgaacataatatgatttactagaggaaaagtatgaaaaaatatgaaacattaagaaaataaatattcaggttatgtcttttctagatactggatgctacttcattttgatgcaccttcattttgattattggcataaaggtgaaacttaaaagataatcatctaaagacccctgcccccttgctttccttatggagactgccacttccagtctggcctctgctttgcctgcctctgaaccccctccacatttgggagccagaagcaggcaagtcaggaatcgtaattgattgggtagtctgtgtgatgtctttgtgtttgtgacttactgcctgtcgcttgggcttatattggatttacttcactttgtcttcctttcacagcagtcttgtccaagttagagaccactgtatctgcttaagatttctttggccccactcggaaaaaggcaggactcataactatgctgcagttccataatccaacccccattttgatatttcagttggaaagagatgtggctgcaagattattggcaaggtctggaccagggggaagctctcactgccatgatccacaacaatgaaacagagcagacgaaattttgggattacctacatgaaatcttcatgaagaggcaacatctctaagtgcccttgcaagagcctttaacttggcggagctaaggagatcttattctaccatgggacataaggagcatccactgcacaaacccttaatgaacactgtcttttcatggattcaaggaattccagttttatctattaagattttatcttaatgatgagtagccaaggtctaacatagggcctctcctcaaggagagatggagggatacaattcttggttcagtgggaaacagaaccctaaaacatccatttgattcaaggtgctggtccaacagagtttttaaactactcacttctttatttcatcctttcgactgtacttgattaccagtgaagtaagatgggtcaggttacgacttacaacttttgttctattccccagactcctcattattcagtacatttcccaataatctctttttctcatctcttgctttataaattgttacgttggtggagaagcaaaacatttggtgagttgtattctggttttccggagttggatttttttatattatatactttcatgtcaaacttctattttacttatttatttatttttttaaaatattttttgtagagatgaggttttgccacattgcccaggttggtctccaactcctggatcaagcaatccatccgccttgacctcccagagtgctgggtttacaggcatcagccacctcacccagccctaattttttttttttttttggctttttctggccaggcgtagtggcttatgcctgtaatcccaacactttgggaggccgaggagaggcgactgcttgaagccaggagtttgagaccatcctagcaagaccttgtctctaaaaaataaaagaattagcagggcatggtggtgcacacctgtagccctagatacttgggaggttgaggcaggaggatcacttgagtccaggaatttaaggctgcaatgagctatgatcatgatcactgcactccagcctgggtgacagagcgagacaccgtctcaaattatatatatatattaagatggagtcttgctttgtcaccagctggagtgcagtggcatgatctcgggtcactgcaacctccacctccctggttcaagcgattctcctgcctcagcctcctgagtagctgggactacaggcatgcaccaccacgcccagctaattttttgtatttctagtagagacagggtttcgccatgttggcaaggatagtctcgatttcttgacttcgtgatccgcccgccttggcctcccaaagtgctgggattacaggtgtcagccaccgcacccggcctcaaatacatttttttaatggccttgtctttcctggttttaggcccttttccacaatttctgatggaaatacagaaaccttgccatcattcttactgctggtttgcatctcatttatggtgtatctgggatttcttctcatgaacagaaagattcagtggctgttatatgccttgtcaatttaatgtattgccctatcctctttttgatcaaagatagagactaagactgggaattatgacagaaaaagtcatatttttctttaaatgattttgaaatgttaaaataggccaatatgagtcaaagtgcaaattttttggtgagtaggttgacaaaaaaaaaaaaaaatccaggaaaaaaagtgcaaatttttataggtcctaattcttttgtttgcctaatgaagtgttccctctattttattgtttttatatgctacaaagtcccatcttctgcagttatggaaacagtgtggctgtatgttttagtaattatttcataatctgtagcacttttcactttaagtgcaatgaatagtccagcttcattcactgtattactaatacgcttccctatgactttttttttttttttgagatggagtttcgctcttgttgcccaggctggagtgcagtggcgcgatctcagcttactagaatctctgcattcccagttcaagtgattctcctgcctcagcctccctagtagtggggattacaggcgcccgtcaccacatctagctaatttttgtatttttagtagagatggggtttcaccatgttggccagtctggtgtcgaactcctgagctcaggtgattcacttgccttggcctcccaaagtcctgggattacaggcgtgagccaccgtgcccaggtgcccccaccttttttttttttttgaggcagagtctcactccatcaccaaggctagagtgcagtggcgtgattttggctcactgcagcctctgcctcccaggttcaagcaattctcgtgtctcagcctccagagtggtgggattacaggcacgcactaccatgcctggctaatttttttgtatttgttttagtagaaacagggttttgccatgttggccaggctggtctcggactcctgacctcaagtgacccacccgcctcggcctcccaaagtgctgggattacaggagtgagccccgtgcccagcctgagactactttttgatggagcccactcaaggggatgaggaggtttaagccacaagtggctggctaaataaaagcttagtcagagctgggcacggtggctcacacctgtaatcccagctacttgggaggctgaggcaggagaattgcttgaacctgggaggcagaggttgcagtgagctgagatcgcaccattgcactccagcctgggtgacgagcgaaactccatcccaaaaaaaaaaaaaaaaaaaaagcttagtcagatttggggatgcagccaaacccttctgttgctgtggtttgaacatacagtctaatgagcagggagaccattagctctttctggggcagtgggacaggaaagaataccttggaccttagggctactctagttgtaatgtattagtgagttatcactagagaagttccacagtttaatattatctatacctatatctatatatctacctatatagatagatatatgttagatgcttcaacaactagggtctacacttaatatactgacatctaaggatgcggccaagaaaagctgtaattaggctgaattttattgccaaagttgttcttttttcatttagtcctttaataaaagatgatcttcataaattacagaaagtttgcttaccctgtttgaccttttgcagaaaagaacaagagggaagacagaccttcaggctgggtgcagtggctcatgcctgtgatcccagcactttgggaggccaaggtaggaggatcgcttgagcccagggattcaagaccagcttgggtaacatggtaaaaccccatctctacaaaaaacagaaaaaattagctgggcatggtgtgtgtgccttgtagatccagctacttgggaggctgaagtgggaggatcgccactgcactccagaaactaaaaaaaaaaaaaaaaaaaaccttcaaaaatatatctaagccagatgtgatggcatgggtctgcagtcccagctactcagaaggctaaggcaggaagatcgcttgagcccaagagtttgaggctgtagtatgctgtgagtgcgcctatgagtgccaactgggcaacacagtgagacctctgtctaaaaaaaaaaaaaaaatctgttgggctgggtgagctggctcacgcctgtaatcccagcactctgggaggccaaggcaggcagaccacctgaagtcgggagttcaagaccagcctgaccaacatggagaaacctcatctctactaaaaatacaaaattagctgggcgtggtggcgcatgactataatcccagctactcaggaggctgaggcagaagaatcgcttgaacccaggaggcggaggtggtggtgaaccaagatcacgccattgcactccagcctggacaacaagagcaaaactccatttcaaaaaaaaaaaaaaaatctgttaaaatttgatatagtaggcactgacaaaagaggtcaaatgcaggactgatttctaagcttgcaatctatctaaatgcagatgctaatttagagtgcataattattacacaagtacagacctaggttagggcttaaatttcattatgtgcaataaaaaggttaagtgatggttaagcaaggtgtagattatccttacctctcctaatgacatgggctcacattggcattcctttcatacttttacgtataaagtgggcagttgtttctgaatgactgttgctggagcctcaggcctgctttgtgcttggtgctttccagactttctcctttattcctatcaccatatacgtactcacaaaagagcagtgtaaaccaggtattacatttccacaagggaaagtagaaccaggaatagccacatgatacttaccgaaagcttcactttccctatagagaaagcaagcaacatgaatcttctgatttggggcccagcctgctgctgtatacagaggttggcattattggtgatagaaatgtctgataggagtcttttaattatactctggagtgtggaggtggagtgcaaggctgcttcctttattactgcaagtgttattttctattatctcaggtttcgttttgtgtaataaactgcttcttgttaaacaatgtcttctgcttcattatttttttgggggtgggtgtaataaagttggagatttgtaaaaaagtttcaggttgggtgtggtggctcatgcctgtaatccctgcactttgggaggccaaggagggaagctcacgtgagcccaggagttcaagagtagtctgcgcaacatactgagaccccatctctacaaaaaataaaaccaagccagccgggtttggtggtgtgagcctgtggtcgcagctactccagcagctgaggcaggaggatcactggagtgaggccaaggctgcagtgagctaatattccactgcactccaacctgggtgacagaacaagaccccaaatccaaaaataaataaataaataaaacatttgctcatttaacaagtatttattggtactattctaggcactggggattcagcaatgaacaagatagacaacgttccttctttcatgcttacatttttaaatgggtgttagggataggtaaggccataataagacaattcagactgtgataggtgctatggagaaaacaggttgatggtggtgaggtgtgagaggtcagggaagccctctgtgacatgaactgagacttaagggaagaaaaataagcagccatgcagaaatcagtgggaagattccaaacatctgtgataagtgatttttttaacacactaaatttacaaatccaaatgttcttcctccaaagtagtcatgagctacaggcttgttttctgcttccattaccaaaaacatttcttggagcttatttggaaatgctttgagaatatgctgcacatctttggaatgagttgtgaaaatggccagaagaagtcacttgagaaacaagtctggctgggcgcggaggctcagtcatgtaaagcactttgggagggcgaggcaggaagatcgcttgaacccaggagttcgagaccagcccgggcaacatgacaaaaccccgtctctacaaaaaataattagctgggcgtggtgtcttgcacctgtgttctcagctactcaggaggcagaggcgggaggatcgtttgagttcaggagtttaaagctgcagtgagctatgaacgtgccacttgcactccagtctgggcaaccaagagagaccctatctcaaaaaaaattctgattaagcatcacaactgaaggtccaagtctgtaagactggcgagaggactgaaaaagacgatgaatgccaagtgtttaagcttcatcctaccaactgagattgttataaatgagcaaacggtatctaactagtagcagtagtagcagttgttgttgttataaaatgaaacaagtctaatttttctttgcggctttgtagtggtcctataggcagtgaaaaacgacagttctttcaggtttattaaagtaaaacacgaatctttcccaacccaacatcttaaagtctcaaattttgattcgccacccccccccccaaccccgccctatgccaatcgcccctagaccaagccggctaccaccagaacagtgtccacttaccagggccctttcctgcatgtccccggccccgtactgcccccagacttcggggcccggagcccatcaaggagaagcctcagtcggcgtacgaacccagagtctcctcctaatctgctgacaagtatgaacccgccgctgttcgaacccagcgtcgccgcagccccggccaagtaaaagaaagaggtggctgccagcaagccaacgagccttccccgagctccgcgccgattcgtccagcccgtaggggtcacgcgaggtcacgcacggaaccgcaaagcctgccgggagcttggtgcgctatggcgacacccagcctgcggggtcgtctggcgcggtttgggaacccgcggaagcctgtgctgaagcccaataaacctctcattctagctaaccgcgtcggggagcggcgccgggagaagggcggtgagcagtcggagtcaggacggccccggagcggaagccggagcatgagcaggggcgggtgggtaggagggcaggaaggtgggtcttcttgtgactgaaggtcccccggatctgcccctccagaggcgacttgcatcacggagatgtcggtgatgatggcttgctggaagcagaatgaattccgcgacgatgcgtgcagaaaagagatccagggcttcctcgattgtgccgcgagggctcaggtgaccgatggctcctggggtgctttctcaggaaaagaatgggggagatagaagtaatgattctccctgccttttgctaggaaaggccctttcattcatttgggaggtatattattcacgccaaagtgggaaaggttacagttttgaaggctgtgtgatcttgacggatttattcattgctctgaactttcgagttactgtacgtaaaatgaggctaaccaataccaccttaaagaatgttgtgagtgtcagatgaagtaatgaatgggaaaatcattttgaaaaatgtaaattgctgctcaagtagacattattgtgtgaaatagaactaaagagactaaaactaaataatgacaatagtttggtttcctgtctaggcttaattgttagctgagatagtagcttctgaacatagtctcatttgtaggtcccaacgcccttttgttgaaaagaggctgacatagatctctccaggctggttaacatcttcatgtgctttagggcattgtgagaactatgggcctacatcaggacaaacttgattgattgattggttttttgggtcagatcttaaaagtctggactagacaaactgtagagctgtcattcttgtatttgttttgtgttttcaggaagcccgaaagatgagatcaatacaggaaaccctgggagagtctgggagtttacttccaaataaattgaataagttgttacagaggtttcctaacaaaccttacctcagctgaaaatggacaagtattttcaatgactgaaatatagcttctgacaactatgcagaggcattttagagacattggcattgccatgccctctttggagggtagaagaggcaaaacacttttttcaccctttggaatcatagtatgggtagaagttatgatttatcttgaaataaaatcctctgaacagaacttggccttttgttgtgaattaggtactctcttcattcttgagcctcccctagaccctggaaattctttccttcctgatttgccctaggagcaggacaaataccgttgtattgtctttccctgcatttgaagtcttttacaccatttagtgcccttgcttttggatgcaataaggaagttgaagttgccttcgtctgtaaatacttagtgattgcctattttgtgcgtagtccctgcaaggtgctctctgaataataaagttaacaaactggtgacctagaggttctgcagatatgttttatttgatccacgcagttaaaaaaagttttaaaattagctggtcacgttcaaaaataggaaaaaaagtcattaaaatttcacattttagctgtatttatttatttgtttaagacgcagtctcgctctgttgcccaggctggagtgcaatggcactatctcagctcactgcaacctccgcctccaaggttcaagtgattctcctgcctcagctttctgagtagctgggattacaggcacccaccatcatgacgggctaatttttctattttcagtagagacggggtttcaccatgttggccaggctggtctcgaactcctgacctcaagtggaccacccgccttggcctcccaaagtgctgggattacaggcatgagccactgtgcccagccacttattttttttaataaaaaaaattaaaagctctggcagccttattttcttatttccacctggcagtaattaggtagagctgattatcatttgtctgcattctccagtgacctcaccactggactctacaaaatggtgaaacagaattaacaaatgtctactttgtttattacctgtttccttctctcaagttagctgcctagttgctgaaggcattcgcttttgtgattcccctgatactaggaaaaattgcatagcattttatgtatactctgccctttcaggcataattcagttagctttttttttttttttgagatggagtctcgctctgtcgcccgcgctagtgcagtggcacgatcttggctcactgcaagctccgtttcccgggttcacgccattctcctgcctcagcctcccgagtagctgggactacaggcgcccaccaccacgcctggctaattctttgcattttcagtagagacggggtttcaccgtgttagccaggatggtctcgatctcctgacctcgtgatttgcccgcctcagcctcccaaagtgctaggattacaggcgtaagccaccgcgcctggccttaggagttcttaacctaggtcaatagactccagttaagacgtctgtgaacttgggggataatttatatttttaactccaactgaaatttagcatttcagtcagggctatggaaaacaaaccacagtaacattatcaaaacctatatgaaatcatggtattttcataccatgttacagttggttacaaatatctcaaaaagcatttatactcatcactagcttcaaaattatgatagttactacgcttcctcctagatcttgtcatttaatgtgtaaataaaggagcactattacgttacagatttgttctattaatagtttaataattgtatttaaacaactggtttcctttgtaattcttggtattttgtgcatttgtaaacgatctgagaagggggtccagaaacctacctagactgctaaagggtccatggcacaaaaaaaggttgagttactagatccaaaggccgtatggacaaacagtacaaccatttcctgaaatcaaatgcattcttttctgatgtttccccagttagaccctataaaaaggtcggctggattgcagacttctggactacgattcccagaaggtggtgcggccctggggcctatccagagttaagacaataactccatccaatagttgctgtcctctcctgacagcctacaattcccaacatgcatggcggctgtttatgccttggggacattatggactccgagttgttgctgggatctgtagttgcttcgtataacgttgggagttggcttcctcttatgatgtctgagggtgggctcgagggaaaaaaagcaaatgcagccattaaataaaaatgtcccctacatccgcccgtacccgatccggatcccgagcgcgcgagggcggaagtggtggtggcccgcgcggccggaagtccagatcagctgatgggggaggcggctccgcagccgcctagaggccccagccgccgagcgcttcgtcccggccctaagtctcggagactggccaagatcaccgcttgcaccgcgctgttgggcgaggcccggtcccgtctctttcccaggcctgagattctcgcccggcacggccgccctgagcgccccggccacccccagccccggctcgcccctcaggccccgggcctcccctcaacccccggccggcggcccaggccccggatccgcggggggggacccggccccggggggtgcgggccccatggagctgatgtttgcagagtgggaggacggagagcgcttctcattcgaggattcggaccgttttgaggaggattcactctgttccttcatctccgaggccgagagcctctgccagaactggcggggatggcgcaaacagtcagcggggcccaattcccccactggcggcggtggcggaggtggcagtggcggtaccagaatgcgaggtgagagtgagctggggggaagaggagcggcaggccctgcttgggcctcgctcgggagctgtccgggaccaggagctgtccccgaccaagagctctcttcaaccaggggaagaaaggggagctgtccccggccgggagctgtccccgactgggagctgtcccaagcttagaacagacttcagaactcgcttttccggccttcctggggtgggctggcttctccacacctgtgtgtgtgtgggtgtgtgtgtgtgtgtgtgcgcgcgcgcgcgtgcgcgcgctgtgacagggagatcctgtggacagaaagtaaatctttcgtcactcctttgccttagagaggggataagggagaagaatcttgtctttgacttgggaatacttaagtgagttcagtctgaggcataccggaaagtagaggaagagaatgtgggtagggggctgattgtgaagaagtgaccacttgtggcttgtcaccgcattgcaaagtgcattgggagcttcttgcttcggggtgatgatctctgatcccagaagcaccaagaagggatcctacccagaggaaaatagaggtgaactggcctgccagagagtccatagttcataggtttagatcatagactttgcttctggccatgtcaaatatctgtcagaagccaaggctgggacttgcctgctgtgccttcctcatggcacagtttttgtcctggtcctcagtggaagctggcttttttcagcagttgagatgtttaatttgtgtgattctactcaggcctttccaagagtcctgttttccaaactggcttgtggagatttctggtgctcctttgggacagagagaaatttacatatatcactttttttttttttttttgagacggagttttgctcttgttgcccaggctggagtgcaatggcacgatctcggctcaccgcaacctccgcctccccagttcaagcgattctcctgcctcagcctcctgagtagctgggattacaggcatgtgtcaccatgcccggctaatttttgtatttttagtggagaccgggtttctccatgttggtcaggctggtcttgaactcccgaccttaggtgatctgcgcgcctcggcctcccgaagtgctgggattacaggcgtgagccaccgctcccggcatatatatcactttttaggagtggcggactggtggcattcagcttcagttggagagaggatatggcctgtgtacacacacacaaacacacacagatcataggcagttttaccgtgggtcttctgtggccttctggcttctttcatatttgagtatgtgggtggtcttggggcttagtgctccctcactttgagggaagtaactgaagtcatagcgatgaagattgttaacatattggtatcttcctggtcaggttaaaatctgggaaaacatgccatattaccccagtcccccgacttcagtcactgacttgtaaaataaaggggttggccaggtgcggtggctcgtgcctgtaatcccagtactttgggaggccgagtcgggtggatcacttgtggtcaggagtttgagaccagcttggccaacatggtgaaaccccatctctactaaaaatacaaaagattcgctgggtgtgttggcacccgcttgtaatctcagctacttgggaggctgaggtgggaggtaagtttgaacccaggagggagaggttgtggtgagccaagatggcaccattgcactccagcctgggtgacagagtgagacttcatctcaaaataaataaataaaaatcaaaaaaataaaataaaggggttaactcttctaaaaaggttctttttaattctatgattttctgatctattaatgtgactagcaattttgtgagatgtagtttgtcatgttatcactactttttggttaaaacactgtggaaaaccttgagtggtaactttatcttagtccaggtgattccagttgcagcagtagctaggtgccctgcgataactctctccccttgagggtttccagtgtgggaagttgtcatttaggcgcgccaaaagtggtctggcctctcgtgcttcttgagatcccttccgggctctggtctatcttgtctccttagctgggggcctacagtcatctagagtaaaagggatggttaaaaaaaaaaaaaaaaggcaatcggagacaagaatgccagaggagagacattaaccatgtaatttgaatttaaaatgctcatggaatatgggaaattcagtgctgagccatgtgagcagggttacttgctagggtcctggaacgcacctgtctggccaggagtttcttaagatatctctggtatcttctgttctagaccttaggtgtagccggctgtgggctggggattatccagctcccctttcccatatggagccttaagggttagtgtatcctgatagggggatccctaggactttcatccaggtctcttctttctttcatagtgaagatgaggcccaggatgttgtactggcatgagtgccaagagaccatggcccttttcatttcctattctctttcccctgatcccaaccattgtttgcaaagatggactggtgatcccattggtggagctgtcagcaaagcaggtggcatttcatatcccatttgaagtggtggagaaagtttacccaccagtgcctgagcagctacagctccgaattgctttttggagcttccctgagaatgaagaggacattcggtgaggccaaaggactgatggtggggagcggggtcctgatactccacactgtctgctgggtttcccatagaacaaaggagacattgtatttggggcagtggtaagaggaagacaagggagggattgcctgggattccactccctcccccccaccccccgccctggggaaggaatgaggctagggagagagtgcctagggcattgtggtctctgacagggtctgccaaaggttatttgctgagttgtggctgtgtcctcttcttcacccccaggctgtattcgtgcctggccaatggcagtgcggatgagtttcagcgaggggatcagctcttccgcatgcgggctgtgaaggacccattgcagataggtgagtgggccatcatgccatgtggcacatcctgctcctcccatcccctggcttatgaagtaagaacacaccgcaagaagctggagcatgttgtctgaataactgcagggccagggtcaagggcagagacccaggtcctgacagcactccctgaccatgcccccatttctccccagggttccacctgagtgctacagtggtgccacctcagatggtccctcctaaaggggcctacaacgtggctgtgatgtttgaccgctgccgggtcacttcctgcagctgtacctgtggggctggggccaaatggtgcacccacgtcgtggcactctgtctcttccgcatccacaacgtgaggccctcccaatttatcccggccctatcctacactccatcccccccttctctgctgcatgcctggctacaatgtgagccccctcgcctcgcctactctgcctctctgtcccccagctccagctccagcaaacctgttctcagattgttccatttttctctgtgtccccttcaggcttctgcagtctgcctgcgagccccagtctcagagtccctgtcccggctacagagggaccagctgcaaaagtttgctcagtacctcatcagtgagctccctcagcaggtgggtgaggtcggcaccccctcctgcaattagctccgggccaggccgcataacagccttcctgttaggcccaggcctccatgggttcacctaggccgtgttctgcctgcctccgtctctttctccctcagatcctccccacagctcagcgtctcctggacgaactcctgtcttcccagtcaacagccatcaatacagtgtgtggagctccgggtgagtgtggtgagaaagattggcagtaggaagaaagccagcttgtagtacagagcgccatttactcaaggcttgctgttgtcaggcaaatccaggcccctatctctagatgactgactgcctgtcatcctcagaccccacagcagggccctcagcatcggaccagagtacttggtatctggatgaatcgacactcactgacaacatcaaaaagacactgcacaagttctgtggcccctcccctgtggtcttcaggtaaatcggatctctgcatacctgtgtctgtggtggagggggagcgtccctcaggctgatgacagatcctttcttctattcatgcctgtgacccctaccttttattccctgaactggcacagtgcctggcacacagttgtcactaacgaattgatggaagatgatgaccttgtacagtcacagagtggtctgctcttacctagcaagagttccttttcttcttttgatagatcaggaaatggaaacagagaaagattttttaaagagtttttgtggctgggggcggtggctcatacctataatcccagcattttgggaggctgacgtgggcagatcacctgagatcaggagttcgagaccagcctggccaacatggcgaatctccatctctactaaaaaaacaaaaattagccaggcgtggtggcgggcgcctgtaatctcagctacttgggaggctgaggcaggagaattgcttgaacccgggaggtggaggttgcagtgaggtgagatcgcgccattgcactcaagcctgggcgacagagcaagacttggtctcaaaaaaaaaaattttgttacagatgtctttttccctctatcttctgtattttggggccggaagcccttttaggtttcattcagccccgtcttactgtcatggttttctgttcctctgcttttacagtgatgtgaactccatgtatctgtcttccacggagccgccagccgctgctgaatgggcatgtctgctgcgccctctgaggggccgtgagccagagggcgtctggaacctgctaagcattgtgcgggagatgttcaagcggagggacagcaatgctgcccccttgttggaaatcctcactgaccagtgcctcacctatgaacaggtaatcactcagcgttggggagccccgtggtagctcattctttccctccccctgcctcatcctcctcttgctgaaatggactctgggagggctactctgcctttctctgagctctcaggtgcagctcacagccttctttgtctccagataacaggttggtggtatagcgtacgtacctcagcctcacacagcagtgccagtgggcacacgggccgtagcaacgggcagtcagaggtggcagcccatgcctgtgccagcatgtgtgacgagatggtcacactgtggaggctggccgtgctggaccctgcactcagcccccagcggtgagtctcccctgaggctcaccacagaactgagcctgggccagctcaggacagactgagccttcatctccttgtttgcagagacataccatgattttagtcctcgggaaacgggaggtgctgagcactggtgttagcagtgatttacgagtcctttttctgagaggctttcatccttccttcccctaaataacacccacttttcaaaattctccagtgtttcagtgatgcttatggggctgggtcaagaagtactttcctgtatcctttccccatgcctctctttggggtgtacacctactccatgcccatcctttcccagtagcccctcagcagcctcctgccccttgttcccacaggcgccgggaactgtgtacgcagctgcggcagtggcaactgaaggtgattgagaacgtcaagcggggccaacacaagaagacgctggagcggctcttccccggcttccggccagcggtggaggcctgctacttcaactgggaagaggcctacccacttcctggtgtcacctacagcggcactgacaggaagctggcactgtgctgggcccgggccctgccctctcggccaggtgcctcccgctctgggggcctggaggaatcccgggaccggccccgaccccttcctactgagccagctgtgcggcccaaggagcctgggaccaagcgaaagggcttgggtgagggggtcccctcatcacagcggggtccccgccgcctctcagctgaagggggagataaagctctacataagatgggtccaggtgggggcaaagccaaggcactgggtggggctggcagtgggagcaagggctcagcaggtggcggaagcaagcgacggctgagcagcgaagacagctccctggagccagacctggccgagatgagcctggatgacagcagcctggccctgggcgcagaggccagcaccttcgggggattccctgagagccctccaccctgtcctctccacggtggctcccgaggcccttccactttccttcctgagcccccagatacttatgaagaagatggtggtgtgtacttctcggaagggcctgagcctcccacagcctctgttggcccccctggcctactgcctggggatgtctgtacccaggacgacctcccttctacagatgagagtggcaatgggcttcccaaaaccaaagaggcagcccctgcagttggagaggaggatgatgactaccaggcgtactatctgaatgcccaggatggggctgggggcgaggaagagaaggccgagggcggggctggggaggagcacgacctgtttgctgggctgaagccactggaacaggagagtcgcatggaggtgaggggatggaaggagggagggctgggtgctccttagccacaactgggaggggctatctagctctagttgggagtgtcaggaccatcagcaggattgtgagaaccctgttgcaggcgccgaactggtctccctgctttcagtctactcacttttctgcttccacgagattttcctgaaatgtgatggtgtcactctgctgcttaaaacccttcaatgggttcctgttgcccttatgataaaatgaaagtggttggcatgacctgtgagggtccacttgatctggtctttgcctgctttgccagcctcacttggctgctctgtcctttgcactccagtcagctgaatcactcatgtatctgccatgctctctctcttgcctccaggattttggacagattgacctttctgcctggaatgctcttccccattagcccgtgtttctccttcaggtctcagggatcttaaagatcacttcctctagggagtctctctgatactgtccctgtgccccaagatatcccacctgcttccccttgacctttccctgtaatagctggcatcacggtggcatgtgtgtttatgtgtctgtctttctaaccagagctcctatggagcggcacagggcctggcatgtagcaagtgttcaaggaatgttggctgcatgagtgagcatgatgtcctgctcctggaagttgggactttaacctgtctggtcccatgtcctccttccaggtactgtttgcctgtgctgaggccctgcatgcgcatggctatagcagtgaggcctcccgtctcactgtggagcttgcccaggatctgctagccaacccacccgacctcaaggtagagccgccccctgccaaggtgagagacccccttcctctaccttcccctcccccacttacccccaacctgctcccatgccccaccccaagtgagagcatccttctacctccaccaaggtaagtcagaatcatctgcctgtctcctgtgtttcttccctttctagggcaagaagaacaaggtatccacgagccgtcagacctgggtggctaccaacaccctgagcaaggcggccttcctgttgacagtgctaagtgagcgtccagagcaccacaacctggccttccgagttggcatgtttgccttggagctacagaggcctccagcttctaccaaggccttggaggtcagaggctccatctcagccttgtatttcagtctctttagagccttgcaccttgatctctattgacacaccagaggtctgagctccttcctgtgccctcaggtgaagctggcataccaggagtctgaggtggctgccctgctcaagaagatccctctgggtccaagtgagatgagtaccatgcggtgccgggcagaggaacttcgggaggggacactctgtgactatcggcctgtgttgcctctcatgctggccagtttcatctttgacgttctctgtgctccaggtatgatgcctgaccctacagtaagtggggaactggggtaggggtagctttctctaagaaagaccaagagccccaagtttctgaatcacctttaggacccatcaggcagcttcatgggtaggtctgtgatgatgaggattttgggttcccctgtattttttcccatgcatgatacttctgtctgcctgacttaccccaacttttatacagtggtttctcccacaggttcccggcccccaagtcgcaactggaacagcgagacacctggggatgaggagcttggatttgaagcagcagttgctgccttgggtgagtcttgagcatatcaacgagctaagcctggttcaggtcttgaaggacatgagacctgtgccttgttgtgaagggctgtatggtaatgggaaggtcaggatgacatgtgtgagccaactagtgcctgtaagacaggaattcagggcaaaaatgtgtgctatatggctgggcgtggtggcccatgcttgtaatcgcagcgctttgggaggctgaagcaggaggattgtttgagctcaggagttcatgaccagcctgggcaacctagcaagacctcatctctacttaaaaaaaaaaaaaaaaaaaaaaaaaaaattagccaggtgtggtggcacatgccttgtgctgccagctactccagaggctgaagtgggagaattgctttagcctggagattgaggctgcagtgaactgtgattgcaccactgccctctagcctgggcaacagagtgaaaccttgtctcaaacaaagaaaaaaaaaattgtgtgctatgggtattgggtattgtaagggcagcaaaacaaaaatctagagaaaggcctaagggaagtggtagaatatggaatgtgggttaaaagatcagtaggtcctaaaccagcgaacaccatgagtaaatacacaacgcaatcaagttttcatgagaatgaggaggccagcttccctaaaatgataagtacatgctgggtaagcagattggacctggttatgaaggttttgaaaagcacaccagagcttaggctggatataatagtcaacgaagacttctataggtgatgtgggttggaccaagggaaccccttacttcatatgctgatggcttgggaaccctggcctcttacctttgctgtcttgggaattatgactactctcaatccccataaggtcctctttctcgcaggcatgaagacaacagtgagcgaggcagaacatcccctcttatgtgaaggcacacgtcgggagaagggtgacctggcattagcactaatgatcacttacaaggacgaccaggccaagcttaagaaggtaagagactggggctgggtgcggtggctcatgcctgtaatcccagcagtttgggaggcagaggcgggcagatggcttgagcccaggagtttgagacaagcctgggcaacatggcgaaaccccgtctctaccaaaaaatacaaaaaattagcagctgggtgtggtggcacatgcctgtagtcccagctactcgggaggctgaggtgggaggattgcttgaacccagtaggcagaggttgcaatgagctgggttcacgccactgcactccagcctgggtgacagagcaagaccctgtttcaaaaaaaaaaaaaaaaaaaaaaggcaaggtactggggcctttgacaggcagagaaagagagcacattttactacctttctcagggagtttccagtacaatgagaaaagtgctattttaggctgggtgcagtggctcatgcctgtaatctcagcactttgggaagcagaggcgggaggatcgtttgagaccaacctggccaacatagtgagaccctgtctctacaaaaaattagaaaattagccgggcatggtggcgcgcgcctgtagtcccagctactcgggaggctgaggtgggagaattgcttgagcccaggagtttgaggctacagtgagctataatcataccactgcactccagcctgggcaacagagcgagaccctgtctcttaaaaaaaaaagaagaagaagaaaaaaagaaaagtgctcttctgcccataggaggtaagtagggaatcttggggacatctcataaagaataagagaagaccaatggttcttataggagtgcttgggcatggggtggaagaagagaagcagagggcataaagtcattcattcacttatttcagtatttattgactatcagtatattctgccctgtggtgttaatggaggataccaagatatgttggggttaaataagttacaaaaagacatgtaaaccaggaggtcatcctgtggttgtaagtggggaaggctccctgaggatgtagcaattggctgtttcaaggagaaaggaaggtaatagaagtcaggagctaaagggcatcctgtcactgcttctctggaggtcactgcttctgtcttccagatcttagacaaactcttggaccgagagagccagacacataagccacagacgctgagttctttctactcatctagccgcccaaccacagccagccagaggtctccttcaaagcacgggggcccatctgccccaggggccctgcaaccactgacctcaggctctgcagggcctgctcaaccagggagtgtggcaggggctgggccaggccccactgagggcttcacagagaagaatgtgcctggtgaggtgggggcactgggcaggggggatgaatggtgtggacctatgttgaggtcccctttcctgggctcatcccagcgtcctgttttcctcacctagagagttccccacattccccctgtgagggtcttccatctgaggcagctttgaccccaaggccagaagggaaggttcctagccgcttggcacttggcagtcgtggaggctataatggacggggatgggggtccccaggacggcctaagaagaagcacacaggtaggatagcctgtgggctagcatagagggaaggataatcctgaaggttggagtcttaacatctgggactcctgacttctgagactgacttctcttgggggttaggcatggccagcattgacagcagtgcccctgaaacaacatcggatagttcccccaccttaagccggagaccacttcgagggggctgggcccccacctcctggggtcgaggtcaggacagtgacagcattagcagctcttcttcggactccctgggctcctcatcctccagtggaagtcgccgggccagtgccagtggaggagcccgggcgaagactgttgaagttggcaggtcagtgggaagaactccccatcttccctgatctggcccaccctcagagccacacccctagtgcaatccaaccattgtctcccagcatcctcactttccctggtccttcccaacctacccggatgcccatttcaaagaaaccccaacccccgtccctaccccattgccccttcaggtacaagggccgccgccccgagagtcatgcccctcatgtacccaatcagccatcagaggcagctgcacacttctacttcgagctggcgaagacagtgctgatcaaggcagggggcaacagcagcacttccattttcacacatccatcttcctcagggggccaccagggtcctcaccgcaacctgcacctttgcgccttcgagattgggctttatgcccttggcctgcacaactttgtttctcccaactggctctcacgtacttattcttcccacgtttcctggattacaggtaaatcatttgacctgacttgggtatgggagggggattaattggtggggataagacccttatctttgtggggttactgatctgataaaaagacattattctcacaccccagtggtgcccacactaacccaactctgcccttctctcctttcccctaaggccaggccatggagataggcagcgcagccctgactatactggtagaatgctgggatgggcacctgacaccccctgaggttgcatccctggctgacagggcatcacgggcaagagactccaatatggtgagggcggcagcagagctggccctgagctgcctgcctcacgcccatgcattgaaccctaatgagatccagcgggccctggtgcagtgcaaggaacaggtatttctacgggcaatctgggaacctcttctggggcatctgggcagggaggttgggcatgggaaagctaagggcccagctcttgattcccgtatcctggagtttacagatgattgttggtcctctcatggcaacattttacccattaatgtgctttcacacccatctttcctttaccttacaactcaaaggttaggtttatttctattttacagataaggaaatggaggcctacggtttagggaccaagatgatcactcaggatagaaaacttagggaaggcctcatacatctaagacttgaatgggagggggctgttaaattagtttggaactgggactataacctgggtcttgactcattttggtcagtatttactcagtgtgtgaagcactcactgctctgataatggactctaagcattgacactgacctctgatgattccctgggaatgagacagctctgagggagacattggaatctcatctaacaccttccatgtggtaaaggcctttcccccttaacactctgtgcccctctcttccaggacaacctgatgttggagaaggcctgcatggcagtggaagaggcagctaagggtgggggcgtgtaccctgaagtgttgtttgaggttgctcaccagtggttctggctgtatgagcaaactgcaggtggctcatccacagcccgtgaaggggctacaagctgtagtgccagtgggatcagggcaggtggggaagctgggcggggtatgcctgagggtagagggggcccagggactgagccggttacagtggcagcggcagcagtgacagcagcagccacagtggtgcccgtcatatcggtggggtctagtttatacccgggtccaggactggggcatggccactcccctggcctgcacccctacactgctctacagccccacctgccctgtagccctcagtatctcactcacccagctcaccctgcccaccccatgcctcacatgccccggcctgccgtcttccctgtgcccagctctgcatacccacaggtgagaccagtgttctgctggggggtaaggcatgggaaaatactgggaattcatagggggttggagtgggtactctgggagtataattggtcagtcggagagtcctggtgaggtggtgggagtctgggggacccagcccaactaaaataagaaatgacggccgggcatggtggctcatgcctgtaatcccagcactttgagaggccgatgtgggtggatcacttgaggtcaggagttcgagaccagcctggccaacatggggaaaccccgtctctactaaaaattagctgagtgcacgcctgtaatcccagcttcttgggaggctgagatgggaatcacttgaacctgggaggcagaggttgcagtgagccgatatcgtgccactgcactccagcctggaggacagagcgagactctatctcaaaaaaaacatgtcaggatagcagcttgtgggggtgaagcacgacagcaacatcctaatcaagtttggcatcttcccctttcttctccctgcccctagggtgtgcatcctgcattcctaggggctcagtacccttattcagtgactcctccctcacttgctgccactgctgtgtctttccccgttccttccatggcacccatcacagtacatccctaccacacagagccagggcttccactgcccaccagtgtggcctgtgagttgtggggccagggaacaggtgaatggaggggaggcacactgggcaggggaggtggggagggaatgttctttgtctctctttgggctctgagttcctcacatggctctcaccccacttagtgagcagtgtccatccagcatccacgtttccagccatccaaggtgcctcactgcctgccctgaccacacagcccagccctctggtgagcggaggttttccaccgcccgaggaggagacacacagtcagccagtcaatccccacagcctgcaccacctgcatgctgcctaccgtgtcggtgagaggacatccctttctgtgctcctacctgcagttgtgccagtggctcttcagaggacccttcctctagctcttcatttgtttactgtggggtcaggtgacaggttggggtaaagggtgaagaggatacaccgtaccatgtgcccacccttatctatctcccaggaatgctggcactggagatgctgggtcgccgggcacacaacgatcaccccaacaacttctcccgctcccccccctacactgatgatgtcaaatggttgctggggctggcagcaaagctgggtaacacctcccctccctaggaccattgccccccccccacctgctctccccaccttccttatcccagacctccttcctagctcttgctcagagttgaggccttggtcgggtatgtgtgcgtgcgcggggggcggagggttacctcagctcctggggtggagggaggctctctgccaggccagagctgagatctgtaagttgggtccctagggcagaggtggccacccccgtctcatgcccctccccctgccccccaggagtgaactacgtgcaccagttctgtgtgggggcagccaagggggtgctgagcccgtttgtgctgcaggagatcgtcatggagacgctgcagcggctgagtcccgctcatgcccacaaccacctgcgtgccccggccttccaccaactggtgcagcgctgccagcaggcatacatgcaggtgacaacctagaattatggagcagggtggagcacttcctgggtggtcttggaccagagggaggcagggcctgtttctgtgctttgtactaaggctcatcctgcacacatcctcctccagtacatccaccaccgcttgattcacctgactcctgcggactacgacgactttgtgaatgcgatccggagtgcccgcagcgccttctgcctgacgcccatgggcatgatgcagttcaacgacatcctacagaacctcaagcgcagcaaacagaccaaggagctgtggcagcgggtctcactcgagatggccaccttctccccctgagtctttcacccttagggtcctatacagggacccaggcctgtggctatgggggcccctcacacagggggagtgaaacttggctggacagatcatcctcactcagttccctggtagcacagactgacagctgctcttgggctatagcttggggccaagatgtctcacaccctagaagcctagggctgggggagacagccctgtctgggagggggcgttgggtggcctctggtatttatttggcatttataaatatataaactccttttttactctagtcgacctgggcctttcccttctttccaaattccatgtgcagatgaaccttcaactggggaggaaacttctgacacttgctttagtctaggtttttcccactccagggaggcagacaaaacagaaaaataaggatgtttattaaggacatttctagcccacagctagggctcatactcggctctatgagccactgtccgacctcatccccattcaatgtgaatgacattagggaggccgggccacaggtagatcccactgcctggctaaaggggccatagcaaggggtccctcccatgcaaggggtctctcccatagccaggtatagaatagatacactgctgcggatgaagagggaaatctcattggactaatacattcccctacaccctgcctggaccctctcattcctccccacctcccaagatgatgggtcaaaggtacctagcactattatgtggggtaccaaaggaagcccctttatttgtcccagaactgtgggaaaaggatacccttcccttctcagccatctcaggcctgggggctactgaggtagagggggaggggccaggccactctaatcccccttgtgggccctgctctggacctgccccttagggaagcagggggcattttgctggtatgggaggctgggacatcagcccagactggaatgctgcagttcttcccgaagccacgagggcactggctgtccaagccggctcagcagcttcgacaactccaaattatggttccggaaaaaatccgtaaggaaaagacgggactgacaggagaaaatgaaggcagaaatggtaagaagtgggacacagaatcagatcctggaagtggagagggattcccctgcccctggctttacttacctcagtgtccatatctggatacctccggcctttgctccggcctagacagcgagtcttaccaccttcaagtccctggcaccaaaatcccttatcatcatcaaacctgctcaacaggaagaggccatgaggtggcagggaaaagagaaactcaagttccataaatgcacaatgcccttccctgcccacagggacatgtctctccttgtgagacagagtaaatctatgtctctaacagacatggtcaacctgcttccccatttcccatacagtactcctcccctgggtcatgctctcccacctgagggtccgtgtgtagttcagaaagggtgtgatacccaggaacttctggatgctctccattgaggctgctgggttggtacgcagctcttgcccatccacaatcagcaactaaaaggacagggatgtggttccctctatattcctaagaagcctctgggctgaagggaagaagaggggaaggggaaccccactgagggctcttgtggggattatacctgtccagaggggtagtaagtcagccagcgttgtagatgggtagaatagtagccagggacaagacagcggttctgcagggagcgtagtgccagaggggtctgggaggaggctgaaatcacctgatagaaggtatagttcagagcaactgggtctccatgggctcgctgatgctgaaggacaaagagaaggaaggtgaaggactggtgatttgacagtattctgcccttacgcttggtctggagacagacagcacagcacgggtacccgtccccaaggcactagttaagtttctcaaacctcactcctttctccctctctagcagtcactgtcccctcccccctccccccaacctttagcctgtgtgtccctagcttcaggcagacctggtaccaggagtaggccctgtcagcagggttggtgagcactgtgatgatcttggctcgtggcaggagggcagccccccgccgtggtacaacttcagagtcaaagtaggtggcacttttttcaaataggaaatcagtgctggcattggaaggaacagggaagaaatccatgtacctaggaagtagcacagaagagagagaagcagaaaaatatgcagagtgaagtggccagaagtctgtgctgagggaagctggaatggggtattttgggggaagggagtgttcctctgagaaacattcaaatggggcccagtctcaccagtcaatacccttgtggtaattagggctgttgaagaactgaatctcctcaaatgtgctggggctagggaagctgctagttacagctgggtgcaggctcaggaagaagtgaatagctgtagtccctaaatgggagagaaagaccagcttcaggcagccattgtgggagggaagccagctcaacagcataagcttgaaggaagtgaaaaaataaccactctgggtaggaaaatcccctatggccaaactacaatgataggaggcaagtctgagagaggcccagggaagggctaaaacagtggttctctgctttaactgtgcaccagaatgacttgtgatcttgtaaaaacaccacagatgattctgatatacaaccagggttaggaatcactgcctcaagagactggatcaatgaggggtgggtataaaaggagttcctttttttctctcttaaaaattcaaattaaggccgggtgcggtggctcatgcctgtaatcccagcactttgggaggccaaggcaggcggatcacttgaggtcaagagttcgagaccagcctggccaacatggtgaaaccccgtctctactaaaaatacaaaaattagccaggtgtggtggcacctgcctgtaatcccagctactagggaagctgagcagaattgcctgaacctgggaggtggaggttgtagtgagctgagatcgtgccactgcgctccagcctgggcaaagaagtgagactcttatctcaaaaaaaaaaaaattattaaaattaaaaatacttttttcactcctgtgattacctggagagagaagagagttccttgacaaaaggatcctttgggtttaaggcagggcaagagaagttagctaaggatacttcacctgttttctggggtcccacaatgaggaacttcgggagacgatcacaggttttctccttggaccagatatctttgtgcctcttgtcatcacagggattctgaagccagggccaataatcagataaggcctattttttttttttttttgagacggagtttcgttcttgttgcccaggctggagtgcaatgcatgatctcggctcactgcaacctccgcctcctgggttcaagcaattctcttgcctcagccttctgagtagctgggattataggcaatgtgccaccatgtccggctaattttgtgtttttagtagagacagggtttctccaagttggtcaggttagtctcagactcctgacctcaggtgatctgcctgcctcggcctcccaaagtgctgggattacaggcatgagccaccgtgcccggcctggcctagtcttctcttaaacccccaccccggctgggcgcagtggcttacatatgtaatcccagcactttgggaggctgaggcgggcggatcacctgcagtcaggagttcgagaccagcctgaccaacatggtgaaaccccgtctctactaaaaatacaaaaaattagccgggcgtggtggcgggtgcgtgtaatcccagctactagggaggctgaggcaggagaatcgcttgaacctgggaggtggaggttgcaatgagcagagattgtgccattgtactctagcctgggtgacagagcgagattctgtctcaaaacaacaacaacaacaacaaaaaacaccccacccctatcatgtctctcatcagactgagctccacctttacctgccaaagggggcttcgctcctgagggaaaagttcaaagtacttctgtgcaagtgggacaggaggaagggtctgtaggcgcagccgtgtccaacactggaggaagcgcaccaagctctcaaaggtgtataggcccagccggtcatttccataattggacagatgggtcataaagatgctgatctgtaaggggtacctgcatgtcagatttggagagcctaccccacctctgaattagccttggtgaataaaggtcccagcctgcaaacaccttggctctccaatcttctagccgttcctctcagcaccttaccggattaagcagcactgtcagaaagagctctccacctcggatgctccggtctagttcacgagagcctccaggatactcattatagaagattgtgtgagtgaagaggccacatgtctgccggggcagcacctggagggaaaagaaaaaacagatgagatttgaaagatagaatgagaagtagatggaggacactgggatttatagaggactgagtctgaagttatagcaataaagctcttactgagggtgttaaaattttttcacctttctacccccaattatgtacccccatacttggactggcagttgatagagaacataggtcaatgcatgttgaaagctgtctaaatgttagagtttgattcaagcctgtattgggagtccctcaccataatgccattgtgaatgaagccacggcggtagcgggcagggcggagatggggatactcctcagtgctggtcacctggatgccccacacggatttccaggcctcatagagctgcgtgtggatggggtacacacccgagtggtggggggccacagcataccccaggtccgtgggaatcccatgctcctgggaatggcatagactctcaccaggacctggtgaggtttggggagtagagggtaaagagggtggggaagcctccaaataaagaaaaacgcaaaggataggaaaagggtagcccattaggggaaggtagaaaaggaagcatggctgggagaaattatggggaagagatccaagggtctcaccagagcaaactgtttgttgagcctcatctggtcagccagcacggagcgattgtggaacaggtgtggctgcatgtggctccacatgtgggggaaccaccagaactctttgcggtgcttcagcagcatgtcgtcccctgcatcctcctcctctgtccctatgaccacacgctgaccactgaccacagccagtcagcccctgttccctcctttattttgtaacaacactgaccaccttccatccctgatccttgcctaagactttctatttgccccactgccaacttgccatccagccacccatgcgaacctaaattcatgcccaccactagctcctcacagcagtctgaccccaaaccttgacccttttcttcaacttgtctgcccagggaggtggacagtgaagggacaggtcaaactatgatatgccaaaggagtaggggtataagctcaccagtatgatagaacttgcccgagaagcccaagttgaaggtgaagttgggaactaaggtcctgagtttgttctgggtggtcaacagagcctgggaagagtagcagggacaagagaaatcaggagagcagactgaacaggaaatacatgagaagtagcattcttcctgcctggaaaggcagggagtgtacctatgacaagctcagaatcaaggaagggagtctgacaggccagagtgtgaatagcttctaagaaaaaaatttaagtaacaagactgacctcaacatcagccaccttcatgcgggtcccttccttgcccacaaagatgtcatcgatgtctaccaagatgtagcggtcaaggtccaggcagaggcgcttgccagtgaggtatgcaacagcatcaacgaagataagtttgtggagccagaaggaaaggccatgtccaaagagcacccgctggatgccatcatgaagccccaggtcctgtaccacagtgggaagccgggcccgacgaagaactggtcctggcactgcgggctcagctggccgaaggctggcaagaagcactggttcatatgtactatgattggattggaagatggtccagtcatcaccaggcagtggccctggttctaggcggctggggcgtgtgagatgcagtagcggggcagaaggattcacttggtagtcccggagccccaagtttgagtgtaaaaaaaggggaaagcccttgagctgggcgctcagtaggctgtgctcgtgggctcggaaaaagccaatgatgcccacaccatactccacgcagtaccggtctagcagttcccgactccaggcatccaggttgacatacttgagcaggttctcataaatgaccaagacatagcggccatgggtattatcagtcaatgtgggcatgtcccctcggccaggtgccaactcagtgctataacgaaaacgactagactccaggatggccacaatttcctgccccagctgtgagtatgcactctccacaaacacaaggaccacgggttcagttcgagctgtctctggaggcctggggggccgaggtggaactggaggccgtgcagggccaggaccagctgccccaccgctgctgcagtctcccaagggcaggggcaagggttccttggccttagggctggtggacacataataagccaggaagcccatggagcccaggctgaaagcgatcagcagcagtatgaggcggtgcagttccagctgccgagctgggcgtaccaccttccacaactggagcatggcggggggaggaagggagggaggaatggggaccacctcaggggatgggaggtaggagttctataggctaggactgtcttggaagggtagaaggataggaaaataggggacagggattcccttggggagtttcctttacgaggtggagacgagtccccttagcatagggtaggggaggtagaaggggaagcagggggcaactatacagagtccacttgtctcaggtcaccatggccccctggcccatggcttcaggctgcaaatcttgccaggctctccccttggccctggctgagcgcctcacatcaaaggtcagcaaagttcaatctcttcccctctacctgtaagacagagaaatcagtgggttactcctccctctgaaattgtcattaatccattctcctccccatcccatctctcttacctcctgcttactggataatctgttctcaaaaaaaaaaaaaaaaaagtttcctctaggagaatctacaagctgagtcctataccttagcttcacagcttgttccctttccctttcttagaatacccaaatgaatgtccaaattctcctctctaagcaaagctcagagatggagcagtatatgcaaatgataggaacaaatctcccatcaacaagaggctaaatatcctagaaggctaaaaacaggcctgctctgaaaggagttcctagcccatgaccgagcagctggcagccagcaacagctctgatctttctgtgaggaagggacggaaagccccggaagtcttcagaagtcccatgctccaacaaaatatcagataaggaactcatgagtctgttaatcttctcatcaatcaaacccaatatcacagccaacagctttaacgaacttgcagtcaggtggacactatggtgggggagttcaaaaggaaagagcaatcctcatgataggtaatcattctaccagtttccaaacccagaaattagggactcccttacccgttgcttgtgaaacattacctgcccctgaccttcacctcaactttgccagtcaggagataaaaatgtaacccctgagcaggccacacactgggtgctgagaaaagccatacagctgagtccactctacttctccttcctaacttagcctaagtagttctacaaccctattcctaaacagctcagaagagtccctgagctagtctggagagacatgaggtattgagtccagttacacaaacagaacaacttgagtaaggactggatgacagagagcaacaggagcttaagtcacatccaaccaatgacagaaggaaaaaggacagtgtgatcagaaaacagttttaaggaggtctaattttggggatctcttttattatttttagatggagtcttgctctgtcacccaggatacagtgtgctagtgtgatcatagcctactgcagcttcaaactcctgggctcaagtgatcctcccacctcagcctcccatgtagctgggactacagctttgcaccaccacaccctactaatttttaattttttttagagatgggggtcttgttacgttgcccaggctggtcttgaactcctggggtcagacagacaatcctccggcctcagcctcctgagtctgttctttttcttaaatcgactgcttctgtaagctttattgtcactatccccactcagcctccttgtaaggctggcaatccctctctaccacccacccccaaacacacatctcaggggtgataaggcagagctgaggtccttcagaattgacagagatgatttaaaaacagttcaggacaggcgtggtgcctcacgcctgtaattccagcactgtgaaaggccgaagcgggtgatcacttgaggtcaggagttcgagaccagcctggccaacatggtgaagccccgtctctactaaaaatacaaaaattagatgggcatggtggtgggcgcctgtagtcccagctactcaggaggctgaggcaggagaatcacttgaacgtgggaggcggaaattgcagtgagctgagattgtgccactgtactccagcctgggtgacagagctagactccagctcaaaaaaaaataaaaataaaaataaaaataaaacagttcagctttggcctaggtaaaacgacacgagaagacagctgggggagaggatcaaaatggtgacgggaaggggtgaatgctaagaatgtgatgcaactttagagaaaacattgtagtgaggaggtcactgacgggaagttgatactcagggtgtatcatcccgtatttgagaaattacaacttgccagccattcttctaagagcttcacatatatttaatcttcacaccagccctaagaggtagggaaaaggtacatgctccattatccccatttcacatatgagtaactcagagaagcttagaaccttgcccaggatcacacagctcagttggtgggagggctgggattcgacgtcaggcctgtcaagctccagagccgcgttcttagccgctgcattttagcttcatacctggaagaagcagcaaggtttagggaaggggcgccgggagcgccgcaggccgggccagtgaacactgagggccagcagggctgggcggggtgggtgtgtgcgggagatctctgaggacggcgaagccagacgggggccggggccgggcccgggcttggggaggccgggacggccggagcagcggcgcggaggctgcgggcgccgagggggcccggggctggcgggtggaggggccccgccgagaggagacgggggcacaggtggatgcgaagagcgcaccggatgtgggacaccaaaggggaaggggccacaggcgcgcggcggcgactccggggtgacatcgagacagcctctgggctgggagagccctgcgggaagaagggagcccgcccggtccggaggggagcgaggcggttctgagggaggccggcggaaaggacccggggcgcggcgcacgctgggccgcccgggacgaccctgcgggtggtgatggtggcaacatccaagggagtctgttgggggggcctgagcgcgaccgtgggcgggggggtctcctcaggggcggctcacccggaggactgggcggcgtccccgctgtccccgggctccgccgcgtcccggggctgcccggcttccctgctttcggggccacgggccgcgtcgcggctgctccgccatctccgagcgaacgctctgccgcagcctggcccaaccaccgctcccaccgggggaggcggcgcgccgccgctggtggcacccgctcggatccaccggctccggccctagcagccgcgcgacctgggttccgggaaatcaagcggccctccgcagtgccgggccgagccgcggcctccgagacggcgggctccgcgccccgcccgcggaagcgcaccccctcctctccgcgcgatggcactgccggccgagcgtcggggaccacgacttcggagcaggggcgggctcaggcctgggctcatccactcagccccgcggagggggagccgggccggcccactcgggggaggggaggagtaagaggcggagcggcctaaccggaggcgggaccaggggcggggcgaggccctcagccggctcccagggcactcaccctccctccccgccccgcgtcgcctgcgcagcaccgagcgctgtttggaggctgtttatgagaagttttttttttttttttttttttttttttttttttttgagacggagtctcactctgtcgcctgggctggagtgcagtggcgcgacctcggctcactgcaacctccccctcccaggttcaagcgattctcctgcctcagccttccgagcagctgggattacaggcgcccgccactatgcccagctaaattttttgtattttttagtagagacggggtttcaccatattagccaggctggtctcgaactcctgacctcgtgattcgcccgcgtcggcctcccaaagtactgggattacaggcatgaggaagttttattctcaaaagtacccaaagggagtaggaggaggtactctctccaacctggtaagccaggctgctaaaatctacgcctctggccgtaaacctccaacagcagtaacacaatggactgtttaaaggttattttattaaatattttcagttcaaggtttcattgtaacaaagctatgaagggtctaccaacattcagaacaaacactatttttaaattatttctatgttgtcatgcaaaaattctgcatcaaatgccttccgtttcttgtttaaaaggtgattttttaatagtctattgtctatagatgctgacattagccccagaagaggagtaagaatgctaagaagtggggctggagcagccatatgaagctatgggtctcaatgaattctaagaccatttgtcttcaagccagcaaaacgaaaccctgtggtgaagggatttgcgtgctggcactgcagactgcagggcaggaaagggctagggcccaggggctgggacatgcatgaggtgctcggaggagcctggctaaatccaagcaccagcacctgtgagtctgctctcttctcagctggctcccaagtaaacctgtagctttgcctcttctcccagctctcgtgcctcctgaaggtagtccagggaactggaatctacccacctttcccccaaaagtggagatgtttgtgcagataaatctgcagcgttgttttgagggaaaccaaggccatgaccaattgctcctccattatcttctttgctatctgcttagggtatagatctcttcctcctggaatggaactccttgagcacagagagggacaatgaaggtagaagccttggctctggacacctcttttgggttacatgcggggaggggtgatgcccatgcagattgtccagcagtaagtctatacttcagttggtcagtaaagaggcctctgtaaggacacctcttcttcttgccagagcagtcaggtcaatctcaaagacaggaaaagagatggacgtgcagcaaggaagaataagaagggaggcagccccaaaggcagcctgaatgcatagaaacgaccaccacctcttctcccactgcctcactcctcccatcccacaggggcacttggcagagggcccaggcccagatgagggtcagcatggggaccactaccgtgaaaaggcaagacaaagatggtccagatcagcacagaaacagaaccgccaaaggcggcacgggagccctgaccagggcctggctctctccttgccaggttagaagaaaacacgaagcaaagcagcaacaacccctccccctcctagctgcagggataaggcctcaatattagggcccacatgcattgtgcatcctatagaaatggatgagtgagtgcatgtcagactaacacgaggtttctcatcggcttcatggcgggtacacttctgcagcaccaattctcttcccttctacactaaacaagacagtacagcaacgtccgggctctcagtcctgaggccaccacttctcagctgcctccacagcaggctgggagctctgcgttctctcccaagtaggtctgatggtcacgatgttctcatcagccccattctaggcgcctatgcaagttccaaagaagttcattcctagacctggggtaagcaggccacctcaggagctgcaatcacatcacggcccccaaagctctgtcagagttcttgcctggtccccctaagtccatggggaccagagaggccaagctcacctcttcaaggccggtgggtgagccactgctcatgccaggatggacctcatacatactcctgccttcttgccaacccaagggctgtcggtggttttaaaacgcatcatggtatggattccttttttttttaaacaatctttttttcttttttttttttcttaaatgtaaaaaacacctcggtacagcagagacagacacgaagggcgggcgggagggctgcatgcaggggcgtgcattggctgctgccgcttttgtaattgaattgttttaaacctcaaacaaacaggactgccgctgtcactcaggccctccagagccactggctgcgaaggttggacctccggctggaatctcctaaagcccctgtcaaacaggacagaatgtggtaacagaacagaggacaatgagcacacagatgagttccagcgactttagcacgctaaacacatggccaagtcggcctgagaaggtggggaaagtgggtgaagctaatgcttaaatacaaaactgcctcccatttgctaagcactaactaagtgctttacttatagtatcttacttaatcctcacaatgattaaatgaggtaggcaccactctctgcctttctttgacagctaaggaaacagtttagggaggggaagtaacctgtctgaggtcatccaatttggagtcacggagccagaccctagtctgtctgatttccaagcataacttattgcaaccattctgccaggctttgccagtcctctgggacggcccacacctcctctcccaggaccacctcccagccttctcttcttcctctgaccccacctatcccaggcccttccagcccctctcccccgtcaaccaggtgcacctgtggctgagctcactgcagcggtgcggcaggggcccctgagcagtgatagtggacattgagccacttgccatcccgacggtgccagacccgggtctcttctgactggctggtgcgaggccgaccctgcccgtcgatgtactgggtgaggcggatgtaggcgatgcacgctgcgtcctccccaatcacgtggacgtgtgggtttaggatggtggtatggataggcttgctgttcttggacaggactgcagggcagggtggggtaggtaagaggacatcaggcctgggcacctgcattttcctcccagcctgcacttccaagtcttaccatctcccaagcaaccactcccagaatctccaagtaccgcccccccccacccccgaacccctgaacgccctccagaggccaggatgccacattacattagtctcctttatccaaaaggaacagaaagatgggtaacagtgacagtacctgctgcgcttttaatcaggcattgtgctggggttttacatgcccgagctgtatttcttggtggataatattttcttcattataagatgaggaaataggctcaaggaataatttgctcaaatcacacacctgaactcaggaccatgtgactcttaactaaagcctatagattttctattctgttaggctgagtttagatttcataaggcttggctcacccctagctagggctgcagaacaaaatcatgaacttaaaccattcaaaattgatttgtaattttttttaaggcaccaaagctgaaatagaatcatcaaagcaccaagctcaggatattcccaggattctctggggaaaaggcaaaagaagttggattgccattatcagcatatgctgtgaaaactgtgttgcttttattgagattcacattttagttcaattcaaatgttagacaggggctacatgacaccttcctagtactaatataaactctggaattgcttctggctaatagaattacttagataacagagagtttatatatgtagctgagatgtgataagggtgggagccagcggagaagttagtgactaactataactcagggcaggatagggaaggcccagcataaagtgggaagagataaaaataaggaaggggagggtctcatagagcagagagaaagatgggagggggtgatgattcagcttcttatccccttattttccatgaactgtccagaatgtacaccccaccccctatacaagacgtctgccttcctccatagtcaggaagattctagccacaacttccgatctcgcaaatcaccaacagtgccctggtttgcacattcttatcctggttttaatttcctctattgtgaaacctgcagacacagagcttagttcttatgtgctgagatcatctcaacctaatctcaaagggtttccttccaatccgtcttggaaagaggtgaggcttaaataattttttctttttttttgagatggagtcttgctctgttgcccaggctggagtgcagtggcctgatcttggctcactgcaagctctgcctcccaggttcacatcattctcctgcctcagccacccgagtagctgggactacaggcaccgccaccacgcccggctaattttttgtatttttagtagagatggggtttcaccgtgttagccaggatggcctcgatctcctgacctcgtgatccgccagcctcagcctcccaaagtgttgggattacaggcgtaagccaccgcgcccggcaagaaataagtgagcttgattgtggtgactggcactgccacaaagcagctgcagaatgaatggcacttggagctcaggagcagggccttcaaaggtgcctgtctacaaccatcggggcacaaggggacaagcatacagagtaggagtgcagcacgaaggtcaaataagggaaaagtgggcaactgggatgagaaggtgagcaggagacagagacaaaggggtaaaggggcaggcaggagtatatcagcagcacgaacccactcacgattctcaaagtaaaacttatggaaatccatcccctccacgaggttaccaagggcctcaggctcaaaggaagtgaggcctggatcacaaatcttcctacagggagaaaaaaaaaagcagcctatcaggcttctatggagtgacttgtcttccttccttatcagcggtgtctatccagtagcagcaggctacctgtggccatgccagacaagacagcaaagatcttccaggcctgcctgctgagccactcagccctgtgctttcggcccactgccaggataccatgggtgagctcagggaatctacctggaagggctcccagtttaggagagggcttaactcagatactttgcccaaggtccaacctccctttccccagggtcctaattgttgtctggaagcagggaaggccttgggagatgacttaggtcacaaaaaaaaatgggtctctacttacgtgtaggcctcaaagtccccattgttgatggcttcaatcagctgttctgtaatcttaatgatctcctgttttcgcactgtgggggagaaaaatccatcaatttacctactggggaacctcccaagttacagagagccctccccagtcctcaggagtcccctgtgatcgcttatgacaaagacatccctcttctctgtctctagggcccttggcaggaagagcgaacacaccttccctcccgtctccctctctgcagtctgcagagacaatgaccactttctcctgaagcccagccattagttatggttctttggcctttgcctccctttccatcaacaaccaggttgcagaaaacacgcttgcctttaacaggtgaggagcctggtacatcgtgaatgctgtgagcccctcccctgtatgagcagcctctctcacaagcatctcccaataaggccgcttccacccccaatttacttctctcacctgaaggggctcagtcaggtctcaatcaccacccccactcgtagccctcattcagtggccaggacccagccctgggtgacaggtagcctgacagcagaatccagctagggctggggtgccaaaggaccatcagaaccctaggatggatgcttcccactgctcaactccacagggcttttctgggagaaatgatcccagaactgtaaaaacttgggacagcctgtaccagagaggctgctccatttacctctcgaggcttgggaaagctgcacatttcacaccagctctcattgccaggacgtgttcctcaggaaaaccagacagggctcagactgacaggcaggcagaggtggtgccctccagaggcctcctccccaacccatccaaagccaagggacagctggtgatgtcctgccggcatgggcttctcttatagggaatgccactaccagcaggggctgccaccagggtaagggagagcttgggttgagcttgggctcatcctaacccgagccctgggcggggccaggccacaaccctttcctcacaggagcaaaaggctgcaagacaactgcaagcgttagaacagcaccaccacggcccagccgggccagcacagccaagcagcacagttgggacagggcagcgcagccaaaggcacatccaggagggggccccacagccgtcagccccgctaggccacagctccaggtgagcaagcagcaggttaagggaagcaaggagttcgatcggcttccaaaagcagcaggcaggtgtgcacccacaacacacacaccctctccaaccccaccagacccatctggatgacctgactggggccccacgggcgaagagggttgtgcttagaaactctgcaaggatagatggtgggaggaaaagcagcagacaaaggcatcctccagcacagacgtaactagaaatatgaggatgagctactgataacccatcgaggcaccgtatcaagacttcctactgccttgtcttttatctaacaaggctctgaggtgcgtgccattttatttccacattacagataaggaacctgcagctctgggaggttaaacttcacactcttgaaggcagtgtagctgggatttaaactcagatctatcttgcctctgaccccatgctcttaatactgttatgctgagactcaggaagcactacatccccaacacagttcctcgctgtcacgatttccccatcatcccactcccacccccacagacctgacttccgactctgcccttcttcctggctcagcgctgaggcaaggcccactgcacatcctgggggctttctactcccctcatcccaggccatgtttttccacccacacttctcatatttctttgggccccagactcaggggcccctgcctggtctcaacagcacctccagtctaccccccacccccagcagaggccatgctcccagagcttactaccacgggcaggtgggtgggactgacagctgtggtgggggtccctgaggggcttcaggacgagccagggagacggaagccagaatgtgcctccctcacacttactggctgaggagcagagagaaggctggggctgcatgcctgcagagggggctgttctgtcccgggagctccgtccttcaggcaccgagctgccattcccagtgcggagcggggcagctagccagccagggcagggcagggcagggcaaggcagagcagccaaaacaaacagaacaaggcaggtgagcgagcaagccagacaggccccgagcccatggcgctgcagagccggggcaaggggacgcctcgcctcaggctgctgtggacactggacgacatcccacgccgccgcctctgccagagaggcctcccagctgagggcaccaggcaggtgcccagacctgggctgtggcttccagacgagccttacaacagcctgtccaaggacccctgatcccggggaagatgttccagggggccaggccacagggtccagagcccagcagtgacagcgcctcctatgttgccagcagtgccggaatcaaaactgatctgacctcactcacaggggcctggagctactatgattcacttcctcgcagctttctgctattttttttggttccaaaaggtttggtgcccccttgccacccagggcatgctctcccagctctgtcctagagtgttcctctgtcttttctgatgtcctggcccaaggtcacttactgaattcaggcaaagggagcaattccaggaggcccaatcaaagagcaggacagagattcccgggggtccagcctgccatgccctcccaccgccctggcactctagccaggcccaagcttaggctagtggtccttacgggcccaccaggacatgaccaaatgtggcctcacggttgtcagattagttccaactccatcattcaggccaaaatcttaggactagagtgaccaactcatcccagtgttcccaggactatctgggttttatatttatatatatatatatatatatatatatatttttttttttttttttttcttgagacagagtctcgctctgtcacccaggctggagtgcagtggtgcaatctcagctcactgcaacctccacctcccgggttcaagccattttcatgcctcagtctcccgagtagctgggattacaggaccccgccaccacacccggctaattttttttttttttttttttttttttgagaagaagtttcgctcttgttgcccaggctggagtgcaatggggtgatctcggctcactgcaacctccacctcccaggttcaagcgattctcccacctccgcctcccgagtagctacgattacaggcacctgccaccacacctggctaattttttatatttttagtagagatggagtttcaccatgttggccaggctggtcttgaacttctgaccttcaggtgatccacccaccttggcctcccaaagtgttgggattacaggcgtgagccactacgcccggcctttttttgtatttttagtagagacggggtttcatcatgttggccaggctggttttgaactcctgacctcaagtgatccacttgcctcggcctcccaaagtgtggggattacaggtgtgagtcaccgcacctggcctatttatttgttcctaattttttttttttaatagagacaaggtcttgctatgttgcccaagcttgtctcaaactcctggtctcaagcaatccttctgccctggccctcccaaagttctgggtattacaggtgtgagccagcactcctggcccatcacagtcttaaaaccaaaagttctgtgtccgaggaaaaccaggagtgattggtcactctatttatgactcatagcacttacaggctacttcggcagggacttggggtacccctgttcttggatggcacatcattatcagcaacaggaacagttctctgagccctggcccctggagaatctctagcttagctattttagacttggggtcaaagaagagaagcctcttgcccaactcagcaacaccagacaggggcctcatatcttggctcgtggaaagtagcttttataccaagccctctcctaggggcataggagccagcattcccagttctggggacagaaaaggcaggtgccccattggagcccaggtacctgggtcactgctggagtccttccccctccaagggccagcacctacctttgaggtcctcatcttctgtggtggtgttgcagctctctgtggagccctgtaggccaaaaagaacatgtttctatatgctccatcccttggaagccagaggagcaaagcagaacaaaagcagagtttctgctcctacaagaggtgcaaggaggaattgtggaaggttctgcttccaccctggctgtctgactcttcccaaatcccctccctagtcttcccccagttggtaaatgccaccatctacccagttactcaggctaaaacctggagtcatcctcaatccttctctttctctttttcccttatattcagatcgcccaatctaaaataaaatcttctggttctgcctccaaagtaaaccccatgtcttacctcttcacttccaatgcacagctacaacctgactccaggccaccagcatctcacacctgaaccatgataacagcttcatggtctccctaacttccacacttacctcctccctagagtttttcttttttgaaacagagttttgctcttgttgcacaggctggagtgcaatggcatgatctcggctcactgcaacctctgcctcccgggttcaagtgattctcctgtctcagcctcctgagtagctgggattacaggtgcctgccaccatgcctggctaatttttgtatttttattagagatggggtttcatcatgttggccaggctggtctcgagctcctgacctttgctgatccactcgcctcggccttccaaagtgcagggattacgggcgtgagccaccacgcccgggcctccctagagttcttgatcatgaggccagagtggtgttttaaagtgtcaactagattctgttactcctgctaagaactcccaatagcttctccttgctgctggaagaaaatgcaaactcctacaagggcctctgtagcaggccctgctgcttctccaacctcatcactctcctatggttctccccgtctcactttgctcttccctctgcttgattacaaaggccacatctgagcttcagttccttctgcttagggcactcagcctcagagctggcctggctgcctccttcccacccaccattcagtttctagctcagatatcacctcctgaaagaagccctctcctgactacttaattcaaggccctgttctctctgtctagtttggtgaggtttttctgtttttcattttttagatggagtcttgctctgtcgcccaggctgaagtgcagtggcacgatttcagctcactgcaacctccgcctcccaggttcaagcgattctcctgcctcagcctcccaggtagctgggattacaggcatgtgccaccatccccaggtaatttctgtatctttagtagagatggggttttgccatgttggccaggctggttttgaactcctgacctcaagtgatccgcccgccttggcctcccaaagtgctaggattacaggcatgagccaccgcacctggccctctctctactttctgccattttcttcagattacctattgacattagattttatcttatttattttttttgagagattaagtctcactgcgtagcccaagctggagtgcagtggcgtgatctcagctcactgcaacctccacctcccaggctcaagcaattatcgtgcctcagcctcccaagtagctgggactacaggcacgcgccaccacacctgcctacttttttgtattttagtagagacagggtttcaccatgttgcccaaggtggtctctaactcctgagctcaggcgatctgcgcaccttggcctcccaaagtgtgaggattacaggtgtgagccacggtgcccagcttatcttatctgtttgcttattggttttttatctgcctcccatcccacccaccgtttgaacagataatttgtcttgtcacctctgtaagccagagccatggatggtatctgggcttaacagatgttcaggaatgctggtgaaaacatcaagggcacaaaggggtcaggccatggagaacgctccagggtctggagatactcttgcctattttttcagtgaacgtttactctcatttaaacttccgacatatggaggaagattctattattatcatccccaatttgcagataaaggatactaaggtgcagggccaggattcagaccaggtctgtctgactgcaaagcctgagctctgtaaggtataatgcccttcctcagcatggagcaactgtgggcacaggctaccttcagctgagcctctgcaaacaccttggcctcagggtgcagcctgtagacccctgggacccagcccacctgtctcctgctgacctggaaagcaggaggcaggctcaggagccactcaccttgatcccatctgtagcgttgtgtaccacagtggtttgtggctcctgtgagagaagatgaagattacccttccgacttggggacagactatggctcttccctgaggagccccacctgcaccccaggacccccgcagaccctatgatgaccactgaggcctgcccaccagccatctccagaagacaaaatatcccggctcaactggggtcccgggcagctgggatagccctggattttggcagcagcactgggctggtaagaaagagaggcctggcaggtgcaggtgcccaggaggctgacagcaagggcctctgtccctgattcctgtcagttctgagggctctttccacatggggttcccacggggcaggtacactagaggagctgtgggactgagggcacaggccgggccccgcccacagcgttcatcacggggaatgtgtgaggcaggaacatgggcagaagaatgaggtctcccagaaagagccaggacaggaggccccctcagcaagctgagcccagagagctgcccactgcgcccgccttctgccttccctagttcctggccccacgccgccacgtcatgtggtatgagggtccgcaaggaggggagtagcaggcaacatcacctctccctctttcccagtcacccccctgctgactctctagttagccaccactagcagagggacctccaagagcacacagaacccctggaggagcccagagagaacttagccagcatgaggcactccaggagcctggagacctcagcaccatccagaggtggggaccccagccctctttcctgtttctggctttgcaaaggagaggctgaggcaggttttacaagggggcctccaagaactgatgttcaggtcccaagaaagctcctaccctctcctttcctaagcaactcaccttcccagcccccacagcagacccactaggggtcctgggctgggcctgggaggttcagctgagagccctgatcactcttccccccaccagcgaaaggagcaggagcaggagcagcacttctgccatgcgggatggagcgcggccaggcgggacaatgaaggggaaggggcatacagggcggcacacaaagcagtcagttctatggggaccaagaaaggaacaggccaggaggccagggagggggcacaagaggaggaagagggaaggggcaggaggcagccagggtcagaggcggagaagctgtagtcaggaggtaccatggccgtctgcaagggcgcgggctcttgggctgggcttacgagactgtttttgttgttgctctgtggctgagacaagaaaacagatggtttagttcctccagagtccccaaggccactcaggttcaactcccagacctcccttgccccctggtctggcctggaggaggtaggcctgaggtggcctccataacgctgtgtagatgggagcgatggctagagagatgatcagaggaagtatttgtggggcccagagacctagctctgggggcaccctcaaggtgggaccagcccaaagccttgttttaaagcatccctccagaaatctctgcttatgccaggtgccaggtcattgcaaaatccacacctgacccaaagaagttcaagatcttcttcccactgtacaggaaaaaggggggtagtttataagaaagcagaacaaaattcagaaactctggtcccctatctgtgggcagtctcctgctgcactttcaacccagcacctgtatttccttcttacaacaccagctcgaagcctgaaacaaagaggaaggagaaaagaaaagtatgcctggcctaagagatggtgtccagaggatgggggtggaagtccctttcagacacaaaatgcattcactgacctcagggagcagagtcaggactgtgctgttcacctttttgtctgacaaatcttaggcctgatcagctagaagggcagtgttccggggaggggcaggtgaaacccagcggggctgtagctgtagtcccagaatccagcccccaggacagagtaggccacacacaggccaacattcccaacagcaccatgaccaccagggatatctccttgcctttcaaaactacatggtggtgggtgggcacggtggctcacacctgtaatctcagcactttgggaggccaaggcgggtggatcacctgaggtcaggagttcaagaccagcctggccaacatggtgaaaccccgtctctactaaaaatacaaaaattagccgggcatggtggcacatgcctgtaatcccagctactcgggaggctgagacaagagaattgcttgaacctgggaggcagagattgcagtgagccaagattgcaccactgcactccagcctgggcaacagagcaagactccatctcaaaaaaccaaaagcaaacgaacaaacaaaaacattacacggaggggcacagcaagggaggggcaaggggaagatggaagaaaggaagaaggctgatctccagggcagggagccatatccatgtgatgttctttgcctctgatagttccctaaccagcgtactccatctcactgagttccagtggggttgggggccactgaggagcagcctgatgcctgcaagttcttcaataggcagtgagacaaatgtgtggctaccatccctgcacagggcacagatgatacatcgacagctagaatgtgtgtcttctctcctaggacatacacagaaagcatcctgactgtcctacttcttgcctggaggcctcttggaccagacctgaagccgtccaccgccagcttgctgtcaatggctcagacatccccaaacccagggctaggcatggaacctcaagccaggcaccaagtgactccactgaacaagactccacagactgcgacaggctagagaagagggggcccaggagtagtgagacggtgggtctaaactcacgggagctctgctgtctctcattcccaccaagaagcaaagcccacctagctcagtgaatgatgctgacctgttcggggttggttagagagggctgccctacctgtaaatcccagctgaggccaagaccctcacagggggcaaggactccagggtgcccacaaaacctgcagagggctgggatgtcacccaagtggccccacctctggtttatttattttttgagacggagtctagctctgtcgcccaggctggagcgcagtggcgcgatctcggctcactgcaagctccgcctcctgggttcacgccattctcctgcctcagcctcctgagtagctgggactacaggcgcccaccaccacacctggctaattttttgcatttttagtagagacagggtttcaccgtgttatggtcttgatctcctgaccttgtgatccacccgcctcggcctcccaaagtgctaggattacaggcgtgagccatcgcgcccggcccccacctctggttttaatggatggtttcataatgactcaggctgctgtgttgcccttggtgcccagtgtcccgtgagaaagatgagttagctgtcccccgagggctgggtgggcagaataaaccactgggcacagctagagagaatgggatttgcacgggggcagagccaggagagcgagactcacaagtgggagcctgcaaccagctcctctgcccaccacacagttgccctccagctgccagtctgtaggaagcagctcctcatgcctgggaagcagggcctctccttctgggtgacaagagagtgagggtctctcccttgcttgccccaagtccctaccagcttcacatcctaccctgggtcgctggggtctgtccaagctccacagcagggggtgccgtaccaccccttccaatgtccactttttaggctactgggtgaccttgggcaatggcccccgcctggcaggacaggccacacctgcccacacagcacagacatgcagtgaggatgagtgaggcacacgcacgtggcagaacaggtttgcgtggctggcaggcgggcacaggcagcatggagtgggcgatgggtgggcaggcaaggctcaccattaggtgcacgctggaactcgacttccttttctggacacaccacagcaagagggaaagagaaggggaaagaggaggtaagaagagaagcacagagacgctgcaggttagcgcaccagtgtgggctctgcatcagggagaaaagagcggagggagacccggagtccagcaccagagggttaaacagcacacggaccgacaggcactcacaccctccagaccctgggagggaagaactcttttgtggtcaggttcatagacacagatttagtatcttctgagatgtctcagccttgctcaaaaaaagcctcttaaggagattaagacacaagtctgtgaggttaagtatcattttgctacaaatttacaggtctgggttcatagggttagctcaccctgtaatgttatttattttctctcattactagaactgtctgaaattcaagtgagcagccaccagggaaaaagcaaaagctactacaggctctcctcagctctaataaaatttgacttctgacttcgctgcatccctactatgctttttacataaagatgctgagcttttgaaaatcacctagcagttaaatgttggccttcctttgtcagtatagccatgcttgtttacaatatttgaattttttattgcattttgcaattcgtggaaaatagaaacacaggagtgccagtgattaaaactacagtgatcataaaaatgcagggatgtaagccacagggaatgttgaaagcagtgattcctcagcctcaactagatgctcacgaactttacgttcacatgtgaaacagacgcatcaagatgaagaccacgtggaacactgaaaatatatcccagaagactgtgtctaaaaaatgaagggtaattatcaatgtcatcattagctcactgggggtaaggtccccctgtaatatgtccgtctgtcgttcaacttttgcacattcatttaacaatgcccagcaaacactgagggctgtttcaggtaaacacagctgataaactgctcctgccctcaagcggccagcattctttagaaggcattttcagggattattattataatcaacgaaagaggctacaaatattgacaatggtccataatttagaattagatttaaaggaaaagaaaaacctaaatatagttaggcctcttttacattggccttttatttatttatttatttatttatttatttatttatttatttatttttagggagtctcactctgttgcccaggctggagtgcagtggcaccatctcggctcactgcaacctccgcctccctggttcaagcaattctcctgccttagcctcctgagtggctgggattacaggcgcccgccaccacgccccactgatttttttttgtatttttagtagagagactggtttcgccatgttggccaggctggtctcgaattcctgacctcaggtgatccacctacctcggcctcccaaagtgctgggattacaagcgtgagccaccgcacacagccttacagtggccttttaaatatgctcaaatatgatattttacttcgaaaatcatccctcaaaaagaaggagttcccttatattcatatatataagtagtggggtgtgtgtgtgtgtgtgtgtgtgtgtgtgtgtgtatatctccttatccctttacccaactaaagtgttactgctttcaggaaggttcctatcttatgtgtctttacaatttccacagtacctagcaacatgccttatagttagcatacaggcgacgaaagtttgctgagttgagctgggtttgctgactttggtttttccccaggctaaagaagagcacaggtttctaacttgcactgaatcacggcagcaagaactctgcgtaggcactcactcaccaggcccagtctttgttctgctgattttcaggggcttgttgtgaaaggccattgcaggatcttgacttaaagcagatttttgactaatggggaataagttctcagccttctcctggcttgctctctttttcctaaattgtcctgcatgagaacctgagatcacccttttccaaagactgtttctcaggttagtcaacatttttcaatttccttctccattcagggatttgcccttagccatgcatagctgggctccttctgaaccagcacactaccacattgtctaaatgtgaggtctttttattatttttttagagataaggtcttgctctattgcccgggctgaagtactggcatgatcatggctcactgcagcctcaacctcctgggctcaagggatcttcctgcctcagccacctgagtagctaggactacaggtgcacaccaccatgcctggctaaatgccagatgatttctaaagaatcatatctcacttttacttaaaaactgtatatttattttaaattttaagctggaaaagcgttcaaacctctttctcatacttaatttaacaaaataattcaaatagtacttagggaaataactataacctttcgtttttcttgcttgctttcttttttaaagataggatggccattctggcctgggactagcagaaggcacaagttgtcctacactctcaggatctgagagtttgtggcctcttcagtcatcctcacaagtggctcttactcttccatagaccctgggtcactggcatccagcttcaaagaaatctaaatagaagctaagtcccccaaatcaagaacacaagacagactagctgctcaaaccaatgctagtattttgaacatcttgcagaaagcttctgaacagtgaaaaagaaatcgccctatggacacttaagcagtaggaattgaggaagggggagttgggaagggaagatgggatctaaaagaagaatccatgatgctgaaagctcaagaccatctgagctacttcacaggcctccctcataacattgatcaaaaccttgactttgagagagcctggaaaggtcgaactctgcacatcttgctttgtcctctccttttcgtttctcacccctttgatgcagccacaacataagttgttatttacctgtttcatattataaaaggactgcagccacaatacaagcaatttggaaaacagagaaggggcatgggaaaaccactaatactcctagcaatcttccagtctttttaaaaaatgcaattggccgggcacggtggttcatgcctgtaatcccagcactttgggaggctgaggcgggtggatcacaaggtcaggagatcgagaccagcctggccaacatagcaaaaccccgtctctactaaaaatataaaaattagctgggtgtggtggcacgcgcctgtagtcccagctacttgggaggctgaggttggagaattgtttgaacccgggaggcggaggttgcagtgagccaagaccatgccattgcactccagcctgggtgagagtgagactccgtctaaaaaaaaaaaaaaaaaaaaaaaaagaaagcaatcttttaagatatcattataggccaggcgtggtggctcatgcctgtaacccccgcacttcaggaggttgaggcgggcagatcacctgagctcaggagttcaagactagcctgggcaaccccgtctctactaaaaatacaaaaatcagccgggcgtggtggcacatgcccgtattcccagctactcaggaggctgaggtggaagaatcacttgagcccgggaggcggaggttgcagtgagccaagatcacaccactacactccagccagggggacagagtgagaccctgtctcaaaaaacaaaaaaaaagatatcattataagatataataatacaagcacatgtcttacctcttttcttttttttttaattgagatggagtcttgcttatgttgcccaggctgaacctcctgggctcaagcaatcctcccacctcagcctcccaagtagctgggattaccaggcatgagttgccacacctggtattatgctttactttaaaaaaaaaatagtatttaaaaaaaattctgataacagtagtgcacaatctagatgaaaaatatagaatacagaaaaatgtgtaagaaaaaaagtttctcaaattcccatcacctggtgaagttactgttgacacttcagtgggctttcttccagtcccttttttatccacatattatatactgaataaatatctacaaacacgtttcttcaaaccaaatttagaatgatagtgtatgtactcctttttttttttattttttgagacagaatcttgctctgtcaccaggctggagtgcagtggcgcacttggctcaccgcaacctccgactccctagttcaaacgattctcctgcctcagccttccaagtggctgggattacaggcacgcaccaccacgcccagctaatttttgtatttttagtaaagacggggtttcaccatgttggccaggctggtctcgatctcctgacctcgtgatctgtctgcctcgggctcccaaagtgctgggattacaggcgtgagccaccgtgcctggcttgtctgtactcctttatataccacttccttcacttaatataaaacatttctgcactttatttttcacttaaaatatccctacggtcatgaaaattaataacttttgaatagtttattaagtagatttcccataattatttagtcatttactggcttttaaaaaatctttttatttttaaatttaaaaacatttttaagagttgggggtctcactatgttgcccagctggcctcgaattcctgggctcaagcaattctgtcctgcgacagcctcctgagtagctgggactataggtacgcaccactgtgtctggctccttactggcttttcaaattgtctccaatcttttttttcttctctctcttttttttttttttttaaacagagcctcactctgtcacccaggctggagcgcagtggtgtgatcctggctgtaacctcagcctcctgggctcaagcaatcctcccacctcagcctcccaagtagctgggactacaggcacgttccaccacactcagctaatttttttttttttttttaagagatggggtctcactacgtttcccaggctggtctcaagctcttgggttcaagcaatcctcccaacttggcctcacaaagtgctgagattacaagcataagccactgtgcccagcctccaatctttccacagctataaataatgtcatgttcaacatttttctgcttttagctttttcctattttgaattatttctttaggaaaaactctcagaagtagaattaacagggtaaaaagaggtagaagcatttttatggttttgacacacaggctgttttagaaaggaccattctggttttcactaccatcactaactagagtccaaaaatggcaccttgtttcaatttgcatttctctgatactagtgaggctagaaatttttccacatttgttatccagttctacttccttgttttcaggttgtcagtttattttctttgatcatctatcttcctttttttttttttgagacagagtcttgctctgtcccccaggctggagtgcagtggtgtaatcccagctcacggcaacctctgccccccgcaaggttcaagtgattctcctatctcagcctcccgagtagctgggactacaggcgtgcaccaccactactggctactttttgtatttttagtagagagggggtttcaccatgttggccaggctggtctcgaactcctggcctcaagtgatcagcccacctcagcatcccaaagtgctgggattacagatgtgagccaccacacctagcctatctactgggtttttttttttttttttttttttttttgagacggagtcttgctctgtcacccaggatggagtgcagtggcacaatctcagctcactgcaagctccgcctcccgggttcacgccattctcctgcctcaacctcccaagtagctgggactacaggcgcctgccaccacgcccggctaattttttgtattttcagtagagatggggtttcaccgtgttagccaggatggtctcgatctcctgacctcgtgatccacccgcctcggcctcccaaagtgctgggattacaggcgtgagccaccacgcccagcttctactgggttttaagagggattatttgtcacagaaactctttcaataaaaatattaacccctcccatcacaacggctgcgaatacgcggttggccttttaattttgggtgatcattggcctctggttcccaccatgatattgaagctcttttctcaaaagaatgtggcataaaactcatttactgagcacatatcagggtcagacacacaacacattgcagggctaggttccccacgcacgtcctcatttaaagcctttacctaatgatgtgtctgcccagccctcatcctcagggttcctggaagagctgcagctgctgcacatttctcttttccccctacctctctgtccttcctctgtttcctttgccgactcttgttccagccctttcttaacacataaccccaaaattttgcctttaccagactcttaaaccttcatgtgctttggattcatgaaagtgtttttaaaattcacagattctgcctcccagccaaggcctccagaacatgaattccaagctgggccctggatgtgcatggtttgagctggctccttgggctaatcttacatggctgcacatgaccttcatctttgacaccagtagtatctagaaagtttggctagaaacctgttctgtaatggtgccttttccatcctctcccctccacctcaacagtcactgctttatttcaggtctcattttatgcaattgctcttcccttcagccataaagaagatactgaagttcccagaatcatcatgctgtttcaacctcgtgtatcttcacatgcgctcttccctctgcctggaatatccctcccctcctgtctcctccttaacccagcaaaatccagctactccctcaagctcaattcctggccatctccttccagaagattcctgtcctggtttggatgtttatctgtctgctcccccagcacctgccaggtgcacacctccctgagaccttagcagactccatagaaacagtagctgccttgtgtctctcccactgtaaacaccttaaaaggtagattaagttttgccttcccaacttctaggggcacagcaggtatcttttttttttttttgaggcagggtttcactgtcacccaggctggagagtgcagtggcttgatcttggctcacctcaggctcaaactccctgggcttaggcaattctcttacctcagcctcccaagtagctgtgactacagatgcacaccactatgcccagttaatttttttttttttttttcacagacaaggttttgcccaggctggtctcaaactcctggactcaagcaatcttcttgcctcagcatcccaaaatgctgggattacaggagtgaagccaccgcacccggcttgccaaatcatttctatcagcactctcaccatagcttccctgctcaatggcctatggtatttcccatggtctgacacagaaacttccaattctgcctgataagactgatccaaccatatttttgacatcaatctaccacacaccctgtgttctcactgggcagagaacatcaatatgtataagagaacccatacaaatataatttgttgtttttaagttatagaaatgtcatgttgttttcttttctcttttctttattttcagacggagtcttgctctgtcgcccaggctggagtgcaatggcgcaatcttggctcactgcaacctccgcctcccaggttcaagccattctcctgcctcagactcccgagtggctgggattacaggcaccggtcattatgactggctaatttttgtatttttgtagagacggagtttcaccaggttggccaggctggtcttgaattcctgaccccaggtgatccacccgccttagcctcccaaagtgctgggattacaggagtgagccaccaagcctgacccatattttcaatttaaagaaaacatatagcagaaagtaaaactgcaaagtgagtctcacctatgtccctgcagctttctccagtacgctctctcctatgagcttcctggactaaaccatctcgcgtgggtccactagcagcgctcagctgactccaggtgcggcccccttcctatggcgactgaaagccacaccccctcttacacctctgttgtgtacccctcagaacagaatgctgcgtggacatctgactgacaggtacttattaaacactctctccaactaaacctgccccttttcctcacctggctccatccatgtagctcaggggcagagcttggggaccgcacgatgcccccagctccatgtcagagggtgtgcgcggagcccaggctcccctgcgaggggcggaagaacacagaagcaggcatgcagagaatgagggaaagaggagggagtggggagggaacggggagggaacggggcttgtgtgtgtatctcagctgttgacacaagatcttgggaaaaggcccagtgaaaatctagtctagagtgtaagctgggaggcttcaagatagcatgagctcctacccaatgccctagccccaggatcctttctgcccccaaagcatctacagaatgtcttgggccctgtgggtagccccagtcacctctcctctaccttggccaagcagccattcccagcagggctcctggtgggtcccaggtccctcctcttgccccagtcccatgggaaaagctccctcacccagtgggaacaagccgtgatccaccatggcctttgcctttttctgaggagcctatgcgtcaagaaagctcgaggctgttgcactcagtgggatctgaaagtgttgtagagagaaggaaaaagaccaaaaggagagtggtttcaggttccaagccctataccctgcctgaatcactcaggcaaatttggctttcatttgattaaaaggatttgtgctctaaaaaggaaaaaaagaaagataaccaaatgacctaaaaaacccagagtcaagccctggagatgaagcatccgtgtagaagtcaggttccggattcagctctggtataaactatgatttggatcacttcccctgagtcattcccatccagctagggccaggaaaaatacctccctacttccctctcaggccagcagaaccttctgttctgagcacaaaggcatctggtttaaagcagactagcaaggataggaagattccctgggaaagggggaaccaggtgccaagaattcccatagtgactgcggggagaaagaggccagtctgttcagaggctggagacacttaccttgacaccgccatccgacttcttgttcaataggcttttggcagctgtgaaaacaaagaggaatatcaagtctcctgcattgtaccctctccccaacctgaagtccggcagccagatccacaagagagtgctgtgtctgacaagggggccaagggtctcccgaaacccccaaaagaggcacttcctatagcctctcagcaagaaggggatcttgagtggcgtcagagccctcagggtggcacctcaggatctcctctgcgtggaggagggcatggatgcacgacacttagaggagaaaccatgctcagtactggagccgcctggggcactggggactctgcctttgacagcttccacccaggcctggaagcagagtgccagggtgaaagagtgagggctccatccctaggtgccatggaagttctctggatggccaaactgcaaggatgcaagacatctcctgagtgttctcaagaagcagagtgtcacagttcacacaggagaccagaggacagacagacacagacacagaaaccaggaccacctacaggagggttttgccagggggttgaagccttcactgagcaggtcctcaccaggttcactgggtcctagctgccaccctttccccagtgtccactctctggacctgtgagcaggaaggactcggcagaataatgagctgtcaaacagattctagccaggcatagggtgacgctccaggctgatgagctctgtgccagaaggctggtgacaccagctggccacaaaaggccacaggaaggtagcagacagtggggaggagagtctgggaggcacagggagatggaatcagcccaactgtctgatacacctggactgcctgccctgggtctgtatcttggttccaccacttgccagctgtgtgacctttggtgagttacttaacctctctgagcctcaatttctttatctataaaatgggataaagtagggctgacatcacaaaacagtggtgggaatccagtgggattatgcatgaaaagcacttagagtgcctggcatatagcaagtactgagtaagtgtccaccatcgttgtcactattgctgccaccctcctgccctttgggtagccattcctccccaagctgtgttccatctctctccagtgagaacaggggtccttccattacgagaattctgactccagaaaaagacctttgatcttatcttgtcgtgctgggtttgaatgttgttttttaaatgtgctgactcctgtgcctgaccgcctactgtctaagtgctttccattcaccagccagctctcaacgctggttgcccactaggatcacctgggagcttaaaaaaagcgtactacctatcttatccctaagggtctgattttattgtctggggtggggtcctggcattaggacttcttacgagctcccaggtaacagctgtactgcacaggcagggctgagagccttcgacagggtgatcttaagcaccaccatgttatttatcatccccattggagaggtgaggaattaaggctgggagagctggtgtgactcgctcagggtgtggcagggctaggatgtgaacccagaaacagctggctctgaggcttctgcactctggagcctttcagacctggaggccagcaagcgccagacttcacaattttgaggagcgcggctcctctgtggggtcttaaacagtgctgcggaaatctagtcctagcaccgggcagctcagggcaatgcccagcactgtctctgagggcccactgttggctgcagccctcccagggcatcgggctcttggcaaggctcccgctgcccagctccatgcccccaggctactgccccctgaaagttggcaagcgcccagcatgcatggctggttagggggctccataacaacgatgcgcttgcagatgccaagttaggtagtctgtctggcatgcccatctcagcccgcaagcatgggactcgcctccctggtgagtgggcccggcatgctggccctcctggtggggtggcagggggccgaggcaggcggtcggggaggactcatgccacgtaccttgcccggccaggccggcggcgctcgcggcaggcgaggcgggggcggagctctgcctgccaactgaggggatacagtctctcagtgcacagagccccgcaaagccacggggccgtcagcagcgagcatgccccagcgcgaggcgcagcccaggcggcgtggccaagccagccgagctgggggagcggagcgccaggggcaggctgaggaggtaggcgcagccagccctgcagcagtctgggggcctgggaagaccgggctgggccagggcatagggaacactgcgtccccaccagatggagagggctgcagtgcctgtctcatgaccccctccggaggagggtccacagcgaaatgcctgagccggtgagaggcaggtgccccttctgaggtagcccggccctagcttaaggctgtgatgaaacgccctcccttctagtccttccctccctagaagctaaatgagcccacgatgagagtgccgggggcgcagagcagccctctcccctctctacatcccacacactagagggactggcgtgggggtcccagggagggtctgtggcccttgtgcagctaagtttactggtgggccccagctccatgccccccaacccctcagagacacaggtccctgtcttaagggaggtagccgagagaggcagcattctcagtctgtgtgtcacagtgtgctgaggtgaaaggtgcccaagaaataaaccctgagaaagaaaacaaaggctgctgaagcaatacactctggaggccccgattcgctgttagccaaactgctagagtccaggataagccacatctcctattggaggtcaactcaaaaaacagccctagagaaacacacaggtgcccttccttcttgattgcatccatagacacctctttctgcagaagcttccggacagactctgtcctcacctgtcccagagtcagggcagaagaggccatcctggaatgcttgcaacattgtttgtctcctctgacccaaggcaaagtgagctcaaaggccagtctaggtctggccaataagaacaggaggctctacagggatgaataaaatgctttgtcctaacacccgatttcctgaaaccaggatgccagtttcctgaaatggagggggaggctgatgtggaggcccggggctgcaagacagggcccttgctattgactggctgggctaaaagagaagcagcagactgtcttcacatttcttcaactcagaggggagagaggacagagcttcgctctaggggcaacaccgaaacgcccttcaatgtcctctggaaaggctcgtagacccaaaaagtagaagctgcgtcattaaagcacaagaagcaagtgtgggactacagttgcaactccaccggaggcagccagccacgcttccctgttcccatctgcgagaggtggagccacaccacagtatgcccgtcgtgggtacccatgacacaagatcaagccccaaaccagggtcaaaggagaaggcctagggcagggcaccaccagccccgggctcactatccagccctggccttccggagctccatggctctcaggctacaccacgaagccctaggctccctgcctgcagcatcctcacagccaaggccctggcgttacctggagccagcgcaggcgagcccagcaggacgggtattcagaagtggctcccactgagtggtggcttaggctcccacacaaccccctttccatggtggtgcagaggggaagcaagggagggagtcttattatgggaaggagaagggggggtcttgaaccaaaacagtgaggcaaggggttagagggagggaggaccgggggagatggcaagctgggcagagccctctctgtcttcagtctcgacattaatcttttcctcacaaaaaagccactgtgcttcccaattgaaggcaaacaataataggggttggggtgagggtgggggcaagaggggagtggagtgtcttgcatcttaaaaataaatgtcaagtatgatttacaaattattggtcccacctctcccaattctttatgcaaatttaagcaagttcctttccctctctcctgctggtctttatttcttcactgttatagctagtatctcagggactattttaagcacaagtcgccacaaaaggtttaaacatctggaataatttctattagtcatctccacttggacaaaatgaagtaagagatcgtcccagcaggcaaatgaatggtggcaatttggcaattgagaagactcactgtacctcatctctcttttcttcccccagcacatcctccaagatcctagaatggctaaaatctgtaaagtgctgagagtcttcagagagttaaataagaatccagagaaacaaggtacatagcaagttgggcaggctactccttgggaagttctaggaaacaattcacaaatgtgagtccagccccctgaatctcaggagcaggactcagcagcagcagcagcccctcaaaacaggatcctcactcgccctggtcaaggtgtggcccaggacgccgaggaaacccagcggtgcccgggatggcaacagcccattcctgatccactcacctcggcataatcaaagtacacagctgggaaaacatacctgagaagttcctggagacaagcatggtcgtgaggatggcaccctggggaaagaggaaggtcctgtgaattcactgagaccctagaaaagggcaggctggtctcaggcaaaggcaggtcctggctagagcctgaagacatcaggcctctgggccccctcccctgtgacatgtacaaccttcagagcccagctccagccaggaggggagcttccttctgaaatggggcaggagccacactggtgcaaggcatgatgtcaaggaggctggcagcctagaaacgacactcaccttcagttttctccgggcattgaacttgcgcaaacactccacagtctcctgacgatgcatcatggatgccaccgtggatcgttgctagaaaccaaacagacaggctatgagccccagcccagatcctctgcgcctcccacagtcctggcaccgataccatgcccaggacagggtcatgcactcagccaccccagagttgctctgaagatgaaatgaggtcacagatgtgaaaacgcttttagaataaaagcactacccgaaactcaaggttacataaggacaacatgaacgtgagaacaccataacggatgctagacgggctgctgagagaccgtcctattcttccttgggaaacagaggctaccgaacaggagagtaccctgggggctgtgatcctcattcagtcactccttaggcagctgtttactgagcacctactgcgttccagatgctcagcagcgagagaacggcagggttcctgctctctacagaggacattccttccttccaagagcccctctccacacacccccagcaaggtcctgaatgaagccatgatcccagaagctaaggatcgtcaccttgaagcatcaattcttttcatcattctggatgtaatttttttttttttttgcaatggagtctcgctttgtcagtcaggctggagtgcagtggtgcaatctcggctcaccgtagcctccgcctctcaggttctcctgtcttggcctcccgagtagctgggactacaggcacatcccaccacacccagctaatttttgtatttttagtagagacagggttggccatgttggccaggctggtggtctcgaactcctgacctcaagtgatctgctcacttcggcctcccagagtcctgggataacaggtgtgagccactgtgccccgccttttttggatggaaatttgtcttcaatgtatttactgctaacttcctggcctccttaaacagagtccatgggacacagtctacacttcctcaatgactcagctgtcaataccagcatcattatgtaatttcagaatatagtgatgtcctcaggggctcgagacacacgggactgcagagggtagggcctgcaaaaatgaccccagaacagaatatttcccccattcttgggtgcctgtttcaggttgcttgccctctccccttgctgttgctgtcttcaccagcctgtcagaaaaacaaatcctggcacctgcagccaggtgcccaccaacactacggggcctcctcgcatcctttccctcacccttggcccactctttccaggtccggaggcaactctccccaccttctctaccttccccaagtctctcattttacctcctcctcggtgtaaatttctccaaaagcaaaatgagaggtcatcagcaagaacccctttcagctcagacttccactcacaagccgatcttcacctgcctccacactaatagaagtctcagggggatcatggtcatccccgggatggaccccctgcccttggctcaggagccccctctctttttctgctgtccaaacctttgcttcctcaattagcaaggatcttcaactctttcctctggactagattcttctctatagattatagttaagcctctccttaaacaaaaaaatttttttttttttttgaaacagcatctcactctgttgcccaggctggagtgcagtagcacaataatggcttactgcaacctccacctctctaggctcaggtgatcctctcatctcagcctcccaagtagctaaggcacgttaccacaaccagctaatttttaaagtttttttttttgtagagatggggttttgccatgttgcccaggctggtctcaaacttccgggctcaagtgatctacctaccctggtctcccaaagtgctgggactacaggtgtgagccaccgctcctgaccaatataatctttaaaaagaaattttttcttctttagaggcagagtctccctctgtcacccaggctggaatgcagtgtcattatcttggctcactgcaacctccacctcctgggttctagtgattctcatgcctcagcctcccaagtagctgggattataggtgtgtaccaacatacccagctaattttttgtatttttagtagagatggagtttcactatgttggccaggctggtcttgaactcgtggcctcaagtgatcgcctgccttggtctcccaaagtgctgggattacaggtgtgagccttacattaaaagctcccctggcccatcttaatctaagtatcaccatttatttcccacctcaatgcctagctccccatgcccctcctcaccctcactccctcttcgtctcactgaaaacagggtttcatctttctctccactgtctcagtgaaatgatgaaacaatggcatctaatggtcagagccaggggattcttccccaacttaatcagggactcttctgcatctgattcctgacgctcccttactgagaccccctgtttcttagcttctgggtcttctggaaggtctcactctcagtgctctttgctgggccccctaactctccctatcattaaatgctggtgtgtagtggccgtctcttctctactacagccaatagaagctcaccgtaagaactcaaccagcataggaacaggcccatctacagcataggaagaggctatttctacagcctcactaccaactacacagaaatgactacaatgtggatttccaatttttagcttcttttctaatctctaggaccatatttctaaccacccactgaatgtgtctggctggaggttgccagactcagcaggcacaaaatgaaaaccatcatcttggccgggcgcagtggctcatgcctgtaatctcagcactttgggaagccgaggcgggtggatcatgagatcaggagatcgaaaccatcctgactaacacggtgaaaccccatctctactaaaaatacaaaaaattagccgggcgtggtggcgggcacctgtagtcccagctactcgggaggctgaggcaggagaatggcatgaacccgggaggcagagcttgcagtgagaccgcgccactgcactccagcctgggcgacagagcgagactccatctcaaaaaaaaaaaaaaaaagagaaaaccatcgtcttgtctcacaaacaagctcctcctctggttttcttctgggtcagtgagggtacaactctccgctcaacttgaaacctggcctctctcttctttgctccccccaaatccaactggagagaattaaatcctttaggttctctcaaatatctcttgaatttcaacacactgcacattcccccatccttaccctctgctgagacctcacctggtcttgcttagactattccaactattaaaaaagcttcctgagctctctgtctccagcccttttcttttaaaaattttcaattcccttctttttttttttttttttttaaagaggtggggtctgaccatctttcccaggctggagtacaatgactattcacaggtgcaatcatagctcgctgcagcctcaaactcctgggcttatgatcctcctgcctcagcatccccagcagctgagactacaggcacatgccaccatgcctggcaattcatttcctcacaacttccaaagtgttcttaaatgcaaatttcattcttctttaaaacccttaaatgattccctatgttttcagaataaaatccaaactcctgaggcagaaacttgtatgtcagggaatcttttgccccattctcttgcattctgatatttgcagcctcatcgacaaccaaacaactcaacattccttcaactcaccatagtttcccataacctctcactgtgctaaactctgtctgcaggttaacgttctgaggacctcgttatttgccaagaacaagcacaggggtgtcacctcctccgtgcagccttcagtaaccccaccacccaccaggaacagtaggagctcctgtactctcattagattcttgtacctacttgtcacattgtaacatgactgcctgtttgagtgcctgtctccctagatgatcttttggggcagggaccatgcctcattcatctttgtatctccagcacccagacggtaaccagcaccaaagaggtatttaataaacacagaatggacagataaataatgcctcgtggttgtcaagatgcctaactctaccaaatcctcttctttgtctgaaagttgatatttcagcttgaaagaattgtgtataaaaacagagtacgtcaacccacactgatagcctagaggactctcctaggactttagcgcagaagctttatgcctcagcttttatgcttttaatgactcagaaaccccttctgttgatttgttggatcttggtcaccactccagtggagttgagatctgagtatgaaccccagcttgggaattcactttgggttttgccagctgctttctatcaccggctacctggagtccacaagggtcaacctgagccctcatccaagaacagaaccaatcccagcctgacagccatgagtgggggagagaggagcagtggcccaccagccccatcagcctcccgagtctccctggtgacatttattgaccctggccctcaacagtcctctgcccgcctgctcagttattgcttggggcccagaatgaatctctgctggtaagaaggagggggtggtgccgagggcacacagaaggctgacacccctgagctccttggccactagcaaagacacttacacagacccacgggtgcttgagagcctggtcagccgtgatgcgctttgctgggtttatggtcagcatctggttgatcaagttcttggcttcaggagttaccgtgtcccattctggtgatgggaactaaggagcaggaatagggagaagaatgtggtattggtgagcttcataccctgcaacactggttctgtcttcaactcaactcctgtaattgggatactctgtggtacctaaagctgtgactggcagagttggagaagccctgcggctattccagaacctgtgtcaacttaaagacttggaaagacagacagaacagtcatgtttagaatgccagaacatcagattagagcgggaaggggactccaacattctctggtttaagcccagctctatacttaggagggaacagaggctcagcaatgtgtccaaggtgccactgcagtggagggagtctccaggccttttgtccctgtgttacacagcacaccaatgaggccgctccattctttgcaagtaaagatcaaaggacttcagtggactcctcaattttagttatgaagaaggctgtgcaaaagaaagttgctccctgggacatagagtggcaagaattgggccctggatgcccattcctgggtcctcaaagtcccctgacacccccgtatcacgtgacacactaaacaagcctgctcccttggacagagcccgaggagcaaggacatctgcccttcctggcctggctgcccggctctctggtccttacatcataggctccagccttgatctgctgatacagcttgtgctgatcctcatcccagaagggaggatagcccaccaggaggatatacaggatgacccctacgagacagaacacacaggtcatgggggtcagtcgcctacttccctgaggaaccaagaaaaaccatgcagggctcagagccacctagaaaggcaggggccataccagagtcagaagtggatgccagccgataatgctatgctaccagcccctcctgctatgcctcacacttcacgtcaccaagtcacaccagggatttctttaggcacaacccatcctctaaggcgtgggcaaatccctctccaagaaggatacaatgtcatcccagaagtacgcagggaggagggtgtgatgggaacagccatcccaggggcaaacaccataatttcacatacaccaggcacgtgtgtgacctgcaaggaatagcgatgcctctttcttgccatcatcggaagttgagggcccttaacagcgaaaagctgagagcgtggaatgggcttaccgcaggcccagatatccacaggttttccatagggatctttcctcaagacctcaggggacaagtaacctggggtgccagcaaaacctgtagcaaaagagagggcagaggcatactgaacccactttctctctcgttaaatccacaccagccatttcccccaagtcccatcttattcctgctgcttttgctacataaactctcagcacatgggcagcaagagctgacaggctgggcttcttgtagcgcctggaatctgaaccagacggcaaagccgtatgcctaccaggaactccagctccttcccacaggcagcaagaaagcagtgctgacaacagctagacttactgtactgagtcgcgtacggccaagagagatctcggaggccaggaccattaagggtctggcttctagttctaatagaggaaggcagatcaggaagaggaggaagggcgggggctgcattccgggaagacaggatcacccttaccaaaccaagcctgctgctctccctgtacttcgatggctaggccaaaatcagccagcttgacggcggcacccttgcatttactcgccagcagcaggttctcaggctgcagaagaaacacagagaaccttgtgagcacccaccctgcagcccagaggaagcctagtttgggcctacgcagtaccactatctggcaccaggtggcgccaacacttcatgagcagaggcacggaggggagcctgggtagtaccttcaggtccctgtggacgatgtcatgctggtggatgtggttaacactctccagaatctgatgtatacagtggctaaaaaagcagaaggaaaagaaatgttagcgcagggttaaaccacctcatccacatccacaaccacatgctgcagactaaggcatgtgacaaggggccacggattcacagagaatcacttaacggccactggaaccttagactctgcacatcatcttgttcaacctatttaaagaaagaggaaaccgaggcccaggcagatgcaatggtttttctaggatcaccgctagaacgggttcctctcacccccttttgactggaaaggtctaacacaaccaactcatttccaagagatcaggagacagcccagaatcctgaggaagaagagagcatccaatcccttccttctttctctttctccatacagtaactttgttcttggagaagaagcttgtgctggcaacttaggaaggagagtccaactaaacaacctaagctactttggcggtgggtgcactcattcatttccctaaatgtttattgagtgcctaggataatgaagatggacaagacccaatagctgccctgaggtctggcatccagtaaggcagctaaaacaagtacaaagatacctttaagaaacaatgtacttaagagcttccaaacagggcatttaaggagcacttctgatgattttgcgtagagaaaaaaacccaaagttattttattattttatttttgagacagggtctcactctgttgcctgggttagagtgcaatgtcgtgaacacagctcaccgcagccttgacctcctgggctcaagcaatcctcccacttcagcctccccagtagctgggaccacaagcatgagccaccgtgcccagctaatttttgtatttttttgtggagacaaggtctcaccatgttgcccaggctggtcttgaactcctgagctcaagtgatccacccaccttggcctctcagtgttgggattacaggcgtgagccactgcgcccagccacagtcacacacgtaaatcagactgtccacatagcaaaccatcctgccatccctgtcatcaaactcctgacagggagcgggggcagtctagagcagtggttttcaactgggaatgaatttgccgcccgcccccccccaccgcaggggacatttggcaatgcctagagaaatttctggttgtcacaactggaggaggggtgctcccagcatttggtgggcagaggccaaggatgcttctaaatgtctgccacaatgcacaggagaggcctcacaacaaggaagtacctggcctaaaacgttagtagcaccaaggctgaggaacttggcctagaatatagacccccgtcatcaggcactatctggtatattaagcacatctgcagagcatcccagtgtatggggctgggtggcctggacttactattcctaaaatctgatgctggggatgccacaagaaccaaggggtcgtactgggtccctgggggctgaaactcgggcctccccataggacacagcccaagagtgggccacagaaactttaagactgagctatagaggcgagtctccacagagatgtataattagaacagagccgggctagcagggagcgccttctggccaaaaatggcaaaagtgcgaagtgtcccagcagagccaggccaagcccactggtacagtcaccccccctcagggccccctccctatagctctccctcctccccgcaggctccctgagccatcactgcctcctccgtcccagagcctcgtcctcccctgctggcactggaattcatctccccacttgagaattcttcccgaggctgaagcatctgaagttgatcagcaaacattggcctctcaaggttgagaaattcgtgaggaagctgcactcccccactctccagaagcagccagagctgccacataagccagataagctgcaggcaggatgatcaaaaccaggttgtagggacatcaccctcgagaaaagcaaggctgggggaagagccaaggcgggaaaggcaggctgaacaggcgcctgagagcgtgggtgagggaggcaccagggattccagggagggcagaggctgaggcatgtggccggggaacggtcctcaagttggaggagccccacggcaaggctggtcatggtggtctagggacaaggtgacagaggctgaaagctcccggggctctatggttggattatcagcccagaactctccactccctcaggacagaaaccatgtcttctgcacctctggatcatgccagagcctcagcacagtggcttgagcacaccagaatttgtcaaaggaaagaaaagggcagagggggacattgggcatggtggcgagtacatggtagtgcaaaaaaaaagtatttctggggtcacagggtaaaggagacttggaaaagctttgtaaaacattcatttggaagtgattttttttgtggggggggggagggggacatagtctcgctctgttacgcaggctggagtgcagtggcatgatcttggctcactgcaaccttcgcttacaggtttaagtgattctcctgcctcagccgcctaagtagctgggattacaggcacacaccaccacacccggctaatttttttgtatttttagtagagacagggtttcactatgttggccaggctgggctccaacttctgacctcaggtgatccaactgcctcagcctcccaaagtgctgggattacaggcatgagccactgcgcctggttaggaagtgctgaatttttaacttctaatatcacccacagtatgcaagccctagcccagctcaacagaatctttctccagacaagagctattctgatcttccccaaagactattcaaacaggtacaatgctggaccccgaaggtggccaagacttccttcagtcctaaactccagagctacatttgaactctcgggccctcatcctacctggcatctgcttcactgtagtactctctggccacaatgtcttcaaacagctccccgccggtaacactgcaaccaacgggaagaagagggtcagaggcagaaagggtcctttgtccaaccccaatgtccaagaagaaacagggtcaccctgtagaatggctttcagagaaatcccaactccccatgcatttcatctgagagctcagaacacactcgatccttcagtgacacccggattctccttgaggtatcatgggccgtcccttccttccggacatttctttttccaaaatgcacagattcactaatagtcaggcagagatgaagatacagggatctaagagaaaacagtcaacctaccccaaaagtcacagctttgagaccaacataaacactaaaatatcgctgcccaggaaggacagagctactactgaagttgaagagtaatgagaccaatgacacagagacccaaccctgagaatcctggagaggagtgtccaggaggtaagagccacttttaagacattaaaccacaaccaacgtggaggagagacccaatccaatggagcctggtttccgactaatgaaagctacctctgatttctcaggatttttaaggtcatgcaaagagctgtcttttatttcttcactaaggacagcacactgagaaacaagacaaaggcatctgtgcaaggcgtgctgctgaacagaagtgcgagaggaatgctgtcctggggttcagagccctggggggacgctgggggaacatggagacccccttggtgggggcagcaatctgccccagtcaaatcctttccctcggacaaaggagggggccctgggcggaggctggagagcctgtttaggcctcttcctgagccttcattttgagtcagctagagggaaaggcccccacaccctcagaaagtggcacttacaggtcaaacacgaggtagtgaaacccttcttcagaaatactgtcatggaggcgcactgcaagagaggagatggggacagagattaacagagagaaaacttggaaatcctaggcttctcctcagcagccccacccctgccccatcctgtcgggctcacagggctctccagaaggagcagtggggggaagtggcgacgtgcccagtgccccccagtgcaaggctatgcagcctgggagccagagcctggcgctctggttgccacctcagactcaggcaagagagaaaagcttcatggctaagaagtcaagatggagaaaagccggaaccttcccagagggctggtctccgagaaggtggtcctgggatatgatgcacgatggtgagatgcagcgtgagcagcacctagcaatgttgacggcaggggacaacaatgaccagatgggaaagccagagagctcttccagagcagtaaatgggagcagaactaaggggtggggaagaaggtggaaaggcagagctcagcaggaaggcacgtggtgcaggataatggatggtgagcctggaaggccacgcacacattcaggcaatgacaacaataacagcttattaagtgcttactatgccaggccttgtgctaggctcttgcatacattactgattctgcaagcatttatcaagcacctactatgtgctggaccccacgctaggcagcgggattcaggaggaacagacagagtgcctgcctttgaggagtttattattcctttcgaccacctgagatgaatgttattcccattctacagatgagggcaccagaggctcagggacacaaagtctcttaacaaaggccaaagagcttctaagtggtgggtcaagatgtgaatccagtgctacctgactccaaagactgtggtctacaccactgcttcccttaagaaatgtggggcagcccccatattcaggcaacaaagccctggcatccaaaagaaagaccacttacaaatgtccctaaagcagcatcgcagacaggtccgggagggtgccactggaagaagactcgggcgatgcaccagctgcgagaaaaagctggcaggcggaatccctccctgctccccgcctccaaagctcttgggtaaaaaaccaacctgaagtcttctgaggtctcctcttcaagtttctgcccacaaagccacctctgggttaaatgccaacccctgagcatcattctaatgcagaaacgactccgctttggctgactgtcctgtccctcccctcacgtgaactctcttgatggggaacttctgttccaaaggcctccctcggtttgacctttgctccaagccttggcagttacaggtgcacctcatggagcacttcaggaatggcctgacaccaaactaaccagttcagtgctaggagacaaagaaatggccatgtctcttcctgggtgggccctggctgcttccatttccagtgtcacacgtttcctcagggctgaggtgcttccctatgtcccctccccacgaagcaagatcattcagaaagcaaagtatacaacccagccggcacagtcccgaggcactgaaccaccactatagcccccttgttctcctcccttgatgactgaggactccgaagcctgccagggccggagccagggcctcaagactgtttccgcatcccattacctacactatttgatctaatctagtgactcaaccccaaaaatcccatcccaatctcagtatttctgggaacgggatcaaaggcaggtgatacttccaatatccctcccattattggatataatgtatatatccaatatacattctctcctgggcaaagaagatgcttccctaggcctgcagatgacagagggggcttttaggacaggaggaaggagccagcgccaggcccctgccttcctcccataaaaattagcctgggcacactccatatacactcaatcaagtcctctcgaagtcctgccattgcctccgccccactcacttgcgcacctctggtctaagtcggtgcctcacgctgagtcttgctgcagctgctgctccctcgcttccaaaaggactttccatttaattaaaaatttgctattaaaaagcattaaagtgtgtaatacaaataatcccctggaaatcagctgtcccagaagctacagaccagctccattagggaggtgactaacagcagcagcatggggaattaacgggacagcagcaggtatgatgctgacaaccatctcagagaagtggagccactcagctctgcctgggcctggcactgagccctgcctcagccagaaccccaccccatgcccaacaccaccccatgccccacaccaccctgcccccgcccagcacagcaaggccaagaacagggcaagaagtgcaggcacccaggcctctgcctagacatggagtcattggcgtctgcccttctccaggaaggccacacacagagcccaggtgggaggaagccggggaagggaattagaagaaaggagcagcaaaggaagactaatccttctaggccacccagcagagagaacagctttgatgtgtgccccagagcaaggcacctgccaagacaaggagggatggaggaagctgtatctgaataagactgctatcgacatttttttaatttgtaaagaaattaacaggacactgaagacaagaggagaaatgactgtgccattctaagtgcctatttagcaacagcagattcattatttctttttttttttaagagacagggtctcactatgttgcccaggctgggctggagatcctggtcttgagccatctcctgtctcagcctcctgagaggctgggaccacagctgtgagccaccgcaccccatcagattctgataataacaatctaaatctaacaactaacacttagttgagctgtccgtgtgccggcatcgttccatgggctccacgtgcattactgtattgaaccctcacaccagctctgcagggtagctacttacatataaataaccccatctgacaggagaggaaactgaggctccataagaaacctgcccaaaatcacactaagtggcagaaccgggacttgaagccaagacaaaccaacatcaagattcctgatattgcagagttgcttgggagtcaccttctcaaattcttaggcaaaggagctccaatctgtccccactacctgtggccattctgactggctcgacaatgtccactgggcagctaccccggagcaggcgaggctgtacatgccatggatgtggctgtgaagaagaggagccggccctgccacctggagctgccaggcgaagagggaagacaggctttaaaccagcaattacacaaatgcgttaactaagcacaactgtgtcatgctgtgaggcaggagcagagggactatggatgcgtggaataaaataatctgacacccagcccattccagagtaaagacagggcatgaaggccaacaagggccaggccatgtccatagacaggaagatctggggaaaggagtataaagcatttactgcatttcagcaacaaacctaattgctgttctttaaaaaccgtggaagacagaacaggccaaaacacctacaaacctttacttgatatttcatgtcttcaaggactgagatagccacaacccaaatgttgtggctatttccaattctttaaaaaccacccaacaatatgccacattttaactaacaaatctttctccaaaaagcactgaaaaagtgttgctgttaaaaatatctgcagcaataacacagtgggaaggaggtcctgttgccatgggggcttgtgggggactgagctgccccccaagagcttactgtggcagggctccccccacccccaccatgggggcagggatgtaggaactgctcagtcatgattcaatgtttctttttatttgcaaccgtttctttgctacacttactgttagctgaatgggtactgggctcaagggtaaatggtcaggcttgaataacttgtgaactgagtcgaggctgggggtcttgaagagatcacttctaggggctggaatctccattttcatcatctccctcctagccccctttcctggctgaaccctttcataacaactccacgaagggacccagataacaaaacagaggcaggcatagaggagttaaataacttgccagaggtcacagttactaattagcaaatcccagattcaaaccccaaatctggatgcgactccgaagccgcaaaacttggcttctccaagtattgacaggcatgcggaccagtagcatgagcatcagctggagactcaggtcctaccccagaccccctgaatcagaatctgaattttaacatgatccctgcgtgagtcataagcacataaaagtttgagaagtgctgctctaaaccacaatgctagactatgatcgaaactgctggggcagctcagcacgaaggaagacagagtctattcattagaggacttgagagcagggagcaggcagatcacaggtagaacggacttcattcagacctcagacctcacaccagcgtctcctcctctcaactccccaccactggccacactcccagcgctgtttggagttcggcagtgtgccttacacccaaacaggcattttgttgtttgtttgtttgtttttaattaataaactttattttcagagcagttttaggttcacaccaaaattgagcggaaagtacagggtgttcccaaatacccgagaacattcccaaataccccacgtcccccacatgcacagtctcctccaccatcaacatctcccactagagtggtggatttgttaccgtctatgaacccacattgactcatcatcattacccaaagtccagagtttatatcagggttcactcttccaacaggcttttaactcctgggacagaatatctagctattaaggggaaactgggcatgactggcccctagcaccaaatgctccatctgaattcagtgcctccgagtctgaccacaggcagggctgaccacatgctctttgctctagcttcctcgactgtgcactgttcttgggctggcccgtttgtttccctttgggatggagttcaagaggccagagccaaaagggtcacagttctgaaggacagcgcagtggagagagaagaggaatagtgaattaggggcacaaaattgcctcctctcctgccacaagccaggtccagatccatggcaaccacagccgcctggacctgcagctccgccacatctccaacagccctggttcccaccggatgctggagctcccaggacacagtcttgactcccccttccctctgcccaccctcaaccccagaatcggtcctcggaccaacctccttaggacctgggagcagtcatgaaatggaagcacagttctaggaaatcagaggccaaaagagtgactgtgccccacctggcctctgagcagacggccaggatatatggtccctccgcctgcctccattctgagccgagggcagatggtaaaagtaaagggctaccaaacagagtgaagtctatggggtaaaaaagtatgtatttaattctagaaataaataaaaagacacctagggcttttttcacctagaattctatttttgtccttcctgctcatttctcaattgtcttcattataccctgacccgtccgtggccaacccatccgtggtcaacccgcccatggtcaacccgcccgcatcgcgggtgatgtggacatggttctgcttcctgcatcactgacccctagctgctgttctcctgcctacatgaggacaaattatcactgctgtaccagttggtcacaaggagcataaaggaaaggaagttaccctcctcagatattgagacccgggtctggaacatcaaaatgcttctgtgcttatgggtggctttagtcacgcacatgttttttcttcctgttctggaacttctaggttagaggtcacaagcttgcaaggcctacaggggcccaggtgggtaatgcaaatgtgagctcatagtgggtgacaaggacagtggccagcgggctgcaggggcagccaccgctcctcacagctccttctggccatgcaaggtgggggctcagcagagccaagccttctgactggaaaggcgggggaatagattttttcttttttcaaaatgtgaaatctcatttttaaatattggcaaataataaaaatatttttagaccactgagtcagccaagcaaaacatgcctaatctgtgactgctgttctaggtgtttccctctgtgggccctctcctaccaaaggcaacatgtcagtccccactgcgctgttttcaggtgaaggcctaacctcagaaaccacctaggagctccagtagttctgcggccaggaacccaccagctgagaggtgctggctctgcagaacacactgcatcaggcaaagccgatcaccactggccacaccaatctgcttcgggtgtaatccaagctgctgattgccatctagaaagccctgcacagctgacgttctgactacctcagagctgctcctctcccagagggctagagcaggacctcagcccttccatgacagagctcactttgactgttctagcccgagacctgggaagccaggggctgggtagctctgaaggaagcattaggcttcagcaagtcacctcacagccctggccgccaacagagcagagcaggcgacctctggggcacggtgggagccctgagatttaggccatgcctgaggagcacagaacacgtgttgtcttttgtgatgactcagggctttcagggaaaacctaggagatgctccttgctctgcctcaagtcaacactggggcttctgctcagacactgcagccagcccagtttctgtcccttctgcaaggagcaccaaatcagggccaacgcttttggcaaagaccatttcagctgaacaaagtaaaactgagccagagtgggttgaggcaggcaaacctcctcaggctttagcacaaccaacaatgtgctcttgtccccccagtcagggtgggagcagggagaaatcctcttttttctccttccccatctgagtggttcctgccatcccttctccagaggagccaggcaggggggcagcttgctttcctggctctggggaatacaaatgggagcaccatggaaacccccagagtgtgcaggacaccgcagcaggaacaaaactctttcaggtccacaaacaaaatcctgacccttgcatgagggctgtggatggcccctggtgagggacgctggcaggctaggagcccggaacctcacacgctgaggaccctggacctcagcccaaagacagaaggagaaagggaagaaatagcatctgaaacctattctgatgcctcacaccccagccctgagaaggtgccgcagtgatgcagatactcaggtctctaaactagaatgccccagaattctgagacacagttgctatcctgctcatgtaaaaacagacaccaggtgaaggtccacagacagaggtgatcccacacacaaaagcagtggatatctgttatccctgcttctacaaaatacccacaaaatgctccatgcccaggcactcaccgatgtttggatgtttcagaagtcgacatatccgagcctcacgttctagtttctggtgatctaaaagcagaagagaaaaaacaaaagccatcaaccatccattctccttgtggtcaccttgttattcatattccttcagttcaggtactaactatgcatttgtgatgatttgctgaagtaatgcagcaagtcatggcaatcctggagacaacttgttttcctttcattttagggtctcactttgtccctcaggcaggagtgcagtggcatgatcgcagcctcaaactcctgggctcaagcaatcctcccacctcagcctcctgaatagctggaactataggcaccagccaccaggcctgggccagatagatagttatgaccaccttttccagatgaggaaatgacttgagggtttgcacacttcgagccagtgagcagcagagctgggatttgaatccaggtattcaactaaaactctggtgctctttccaccacaacagggtttcagtggtccagggtgtccagaatctctttttttctttctgagacggagtctcgttctgttgcccaggctggggtgcagtggtgtgatctcagctcactgcaaccttcgcctcctgggttcaagcaattctcctgcctcagcctcccgagtagctgggattacaggcacacaccaccacgcctggctaatttttgtatttttagtagagacggggtttcaccacgttggccaggttggtctcgaactcctgacctcaggtgatccacccgcctcggcctcccaaaatgctgggattataggcgtgagccaccgcgcctggcccagaatctctttcttgttaggaacactaataatagctaagttatactgagcacctaatatatactcggcactggctaggggttttgcatatattctctacatagtcctgatggcaagcctgaaacataatgatgctgataataaagaggttgatgatcaagataatgatgacttaaaataataatagctaacatttattgagagcttacttctacaccaggcagctgcctcttttaatttatcctcataacaactctaggaggttggcattagtatgatgcccattttatagaaagagaaaccaggacacaaatcctgcttctccccggagtcctcttggccaccatggctgtaagctttgacctcttcaaattcagactccaggattacttggttttggtggaataaccagaaatccacaagtccccagatccaagtgagctgcgtgggtcaattccttccacaggaaggcagagctccagtacgtgggaagagaggatgctactcacagcacggaggcctcacagccctcccccactgtccttccctctttctacttgctgaaatcctgccaaaagtcacctccttcatgaagtcttccctgctcctctcggtagactgtgacttctccctcctactccaccccccccccccccgatttcccaatgcacttctcacgattctcacatcatatattacatcagttatctttcagttgcaagctcttcgaagggcgggggtacctttccaggtagtgctttctagagttctttctgtaaacaggggcttaataagggtttactaataacagtagtcgccataacaatcgcttactatgcactgactacatgtcaggcagaggcatggattaccatatttcatacctacagaaactctgtgaagtagggatctgattagctctattatattaccgaggaaacaggtttaaaaagatagagtaatctgcctaaggtaacacgaacaggcagtgatgcaggtggtctgagcctagagccctctttctccacccctgtgctattatggccagataaagaatggtgagagttgagttaagactctaggctttggagggggtgcaaaaggaagagagtccagttcaccctgaattatccaggcccgggcaggggccttcacatccatagctgccaagctattcctgtctccctgcctctaccctaaacagcaaaaagcttctgtaaatcttcccacagccctcacaatgatcccattaggtaaatgctatgattgtccacatttccagatgatggaagaaacggaggcccagggaagttaagtaacttgcccaagatcccacagcaggaaagggataaaagggggattcaaactcaggactgtcagtgtgagataatgtagggattatggactagaagaaattcacatttattgtttcactaaccaaacccagctttgtcctaaactttccctctagcaacagctctactttgtggaaggaggtggggacagacagagattagttcctgctgcccagctaatccgtcccagctgcccaaagatctgggtcaggccttccttcctgtgcctgggttcagcatgaccaccgaccaggatgcagccaggagaaccccaagtaactcccaactcccagatcacctggcatcccttggtcccaggcacagggatgtggccagtgacctccagaagcgaggcactcaaggaggctgtaacagccttgcctggtggctggggggcttgcttcttccagatctggcaggatgttgacatgaccccaccttccttccatccctggacttgagatggaggtaccaagccagccagccccaaagctacagacccacggccctctctctgggcacaaacctcaccaccctccagcccataactctcaggcttggttgcctgggcaggtgcaggagaacagcatcttgcaatgcggaggtggcagctgagggaaggcccagaagattaatgtttatctccttccttaagtctcttactagctaatggttacagtcccacaacagcaacagcactaaaaataagggcactctgctttaccagtgactttgagtggagagaagatacacagactcaggctcccagctcctcaaaggagctgcccagcatccagagggtccttgttagcctcttagttcagccttaactccaaggagctgagccctgtgttcccggcaaggcccaggtcttctctgaaccccaggactataccttgatcctcattctgattctaagctgtggagtatggcaattaacaacacatcggttttgaagtcagacagccctggattgagcccaacactgccacatccagcaagctattaaacccacccgagcttcattcattccttcaagaaatatttatcgtggctgggcgcggtgggtcacgcctgtaatcccagtccagtactttgggaggccaaggtgggtggatcacttgaggtcaggagttcaagaccagcctggccaacatggcaaaaccccatctctactaaaaatacaaaatttagccaaatgtgctcactagaacccaggaggtggaggctgcagtgagccaagattgggccactacactccagcttggggtgacagagcaagtcaaaaaaaaaaaagaaatatttactgaggcctactatgtgacagacagtattcaagatgctaggaagacagtggcgaacaaaacagacaaaaatccctgccctcatggagctgacactctagtgggttgtgtatgggggagggatggacagtaagaaaactcaacagcacgttagatgtcacggcaagtgctgcgtagaaaaagcagagaaagtggggagtgcagatttgagtagggcagtccaagaaagcctcagtaaggaggtgacatttgattaggacccaaagtaggtgagacagtgagccaggcacattatcttgggaaagaggttcctcacttcttttgtttgttttttttgcttttttttgagatggagtcttactctgttgcccaggctggagtgcagtggcatgatctcggctcactgcaagctccgcctcccaggttcacgcccttctcctgcctcagcctcccgagtagctgggactgcaggcgcccatcaccatgcccggctaatttttttgtatttttcagtagagacggggtttcactgtgttagccaggatggtctcgatctcctgaccttatgatccgcctgcctcggcctcccaaagtgctgggattacaggcgtgagccacggcacccggccaagaggttcctcacttctaaaatagagacagcaagatctgaggtttaactgaggtggtacaggtcaagagttttgcataaggtctggcatatagctcctttccaagggcccagtgagaagcttgacagggtctcctgggctgggcttgtggccacagctatcaccagagacactgtgaatgggacccactgtcccctcagcccaggcagatgcagggtctgcaacacagcaactaagccctcctgcctggcttctgggctccccacatggtcctccattgcagtcctggaggtggagtgtccctccctgttttggcggggcccacctgtgtctacagtctgcaggtgatgggcagcaacaggggctcctcagagagaggggaacgccgcaggaagtgccactgtccgcttccctcctcttcctcgcagccgtggcaccctgccatccacaagctctcctcaatgaacagagcagtttctacctgccccgctctccccgttcctgctgccacatactgcccggccaccacccagcctctccagctgttgtctcctgtctcttcccctgacacttcctgtcctgtagtcacatccagggctggcccacggctgcaaaaaagcagagggtccatcccagcagcagtggcagcagaggggttccaggatggagtagtggtttctagagcatctttcccaaaagcaagggcatcccagctggacgcagcatctccaaccccaaaaagggcgaggccactgaatgggcttggtccacagtgggagggccctggctcggcatctcaaggtgctgcaaaggtgtctccccttgagacacccctccttccagtaaccactagggagaggctcagaccttccaaggtggaccctcctccacgcacctttctaccaggctcatccccgcccctcccacagcccagccccccccttcctgtttgacaactgccacttcccgcttttgcacagggccacttcctgcctgcctgtgtgctactgccatggagagacccacccctgccggccttcagcccagctccaaccacagccctctgcaggttttccccatcattagcagaggtggcaacaggagcagaaagcagaagcagctccagcctttccccagcagcctgcctagaccagagtggtctgagcccaggccagagccaggccctgggaaacaaggatcctagaaacccaacctctcccgccttctgcccaagtgcttcaggacttggtccaaggtgccacgatttcacaggaagggcagcaagaagtgaccagatgcaccaggggaggcagaaaagaggaagcagatagggaggtgatagcttgcagccaaggggtgcaccaagcctgcccctgaaccacctccccctctggcctgaagacagaagcctactccaatgccctttccttcctctgccaggtcagggggccagggagggctggccacagattctccatggccctctcagggatgggcctgcttgacttagtgacattttcctaaaaaaaaaacacaaatgccagcactagcttcaaataagatcctgctgccacgtaaacatacaatcctctgtacgtgggaaaggatgcacattcctactctgactgaggactctcccaagttccaatctcaaagacattcttaactttgtaaagggtattttgcaggtctgtgcctatgaccctaaacatggatgtgagaaacttcctgcaaccccactgatttcagggctccatgggaggcggcctcacttgctgccctcctgagtgcctttcatcttcttcccaagcagcagaggccgccgtctggtccccttggcactctgaggagcagaaacaaggacatcgcagggatttgatgtcataatccaccttccccagctgcttatgcacagccctgggcctgggacactgaccagtgggaatcccaagccacgatcccaccgacctcaccctgacactgtgatgccacatcccttcctctttgaatctcactctaaagatgcaaagagtctccaattaaaagcaaagtccatccgacacacaagagcaggaccatggtttctaatgccctcacacatgtacacctggtgactagctgggggctgtgatacagagggacggggcctgaaatggtcccatgtgaacccccaaggctctgtgcatgtacccagcatcctccccttatcttcaaccctcactcaagcagttttaacttggtgacacaaagacctgagccccactttggcctctggatctcaaggcaagggaagcgagaggctccaagaaatgccctatagcgaaaaggccctcaatcagctttgacagagaaaatccccaaggggtcactagcaagccccaagaaggcaaggctctgcctgggggcactctggctgctctcaagggccagaaaagggtcagccgtctgttctccatgccccccggcagggctcccggtgcctgcagcctttgcccactgttttggtgacatttccttcatggtaaccagccccaagtaaaacatcccaggaagcagcccctaaaaatagctcctcccagggcagcagcaagcaggggggaagggaaagaaagggaggagaaaagaggggagcagatgggaagctgcggctgctgctgatagggcccaggaagcggagatggtgttggggaggagtggctggaaatctccccaccgcacagcccagagaggtgggtacagacgggaatggggcctcagccagcaacgaggagggatttgctccaccaggcttggagcttggggcctagatggagaggtgtgaggtgatatgccaagattcatcacaggaacaaagtatccagaacctgtgttttaaagaaaggcgccaaggagtgggtggaggccacacggcctgaggacgctgggtctgagccctggcaaagtcatgggcacctgcagcacaaaaccaaaaaagaaaaaaaagaccccagacaaagcttttgtgctttgatttccccagcggtcctgcggcagatctgtctggccatgggtaggtgacaaaggggctctgcagagaggcattcaagaggtgcaaagtgcccatctcctcctgtcaccacccttttggcacccatgggatcaggcccttgttggtctgccaaagctgttcagagagcagcaagcatacagatgggagcaggaatggtcacacccagcctccccttccctatctccagtctcagcagagaatggggtcagccactcacctctagggtttcagcacagcttcgaacaagggtatggtgacaagggaccagaggaagcagcaggaagaaggcaggggcctccctgacaggacagggcaaccttcccacctccatccccacaccatgatgcagcaccccaagtcactctaggaagacaggtgggaggggagggggacaggccagtgttgtgtgtgctaaggcccacagctcaacgtgaccgcgtgacaaaagccgcctggcagaagcctttgcacagagggacctgcagtcggcttccatcccttcaggagagaaagtagaggcgctccatcactgatatgcaggatgcccatttctctgtttacagaaattggcctgttttatcctcaggaggaaagcatggtttcgcacacagcctccttaaatgcttcctcgaggcctgtgttccagtgctgtgtggatttctcttccttctcccactccctgcattactgcttccccctcccttctctttccctcacttcacccagatccttaacaggaaagtctcacttggagataccacaggggacacaaatgtcatgggggctactcaggccaacactaagggggcggggactctcagctggcaccatccaggggatcccatttcagtccccagggccagctggacccagaaagggacagcctttacccttctggtggccaacatgccacaacccgagccacccagcttgccgcagcctcagacacagacaccccaatcccgaggcccagaacgaggcccctaatcacagaacagcccatgtgcacagatggccacatagtggcagacacacaatctggagaaggatgggccaaggtgtgtctgttgaattccagagggcatggcaagagcaactgttgttgcagattttaggtggcatctcttaaagagtggctcatgcctcacctgcatgaaattcactggagcatgtgttaaaaatgcagattctgcagctccaccctagacctcctaaagcagaatctctgtggctaaagcccagaagtctgtattttttaaactagtactcagggtgatccttacgcacactaaaattgaaaatcactacctggaagagatcccaacagtggccctatagtgccatttagtgacagggaaggaggaatcatcagctaaatgtctgcctacatctcccactctgccttatgccccaagcacaggtctttatcctcatctgtcctctcttccagcagccgtatcaggtctgcagcttggctccctggatcagaaagggaggacccaagtctgtagcagggtacaagggctctggcaacttgactctgagtttcctaggagccaaagccaaaaggcaaccatgattggttacatagtcctcttgacccattcatttaatgtgtatgtggctggcatacgtcaggcacttcgctagggcctgcccatgcagaagtatagaaacacataaggacccttccctcacctctcaggtcctcacaaagaggaaagcttttgcttacatttagcttcaaaagaaatttcttcacacggaatgtacagattaaataaatatgttaaagtattataacagatttcaaaacactgtttccggtagcatctcttagtaaggccaagggcattaccccagtatctatcttggtaaaagcaactggaatccagataaatggtacatatacagaagtttcttgtgatgctgattgttttagggataaatcctaaacgacgtagaagaaaggaccatttgcccttcaactgtagtaatatgggggaaatgctttggatataagcaaagagagcaggatataaaatgttatgctccacgaggtgaaaatctgtatgcatatgaataaagataagaagggaatatgaagatttaaaaataaaaaaagacataagggctcaggctccttgaggggggtgctcttaaatcttaaaataacgacttatcattgccatcacctggcccactagctcctgcatccaagcctattttaaatgcctccttcggcctagtggagctaagcttggaaccatgggctcccttaagagcccagctccactcctatcacggttctgaagcaaacggagtgacgttatgtgactttcagtgactttatgtagacaggcccgcagacaaagacagtgctcaacgcatatccgcatgaactccccaccttgcaacctagccgccaatgtgggcctctgaggccacagtgacaagacacaacagcccaaaagaaggcttcctgtctcgattggacccccccagaagaacaggtgatccctctccctgactcctagccacctcaccagggatgccaaggagaaacagctctataccctctttttatcttttcagtttgtagcccagagaatcacaaacaagaaagacaggaggcaggaagacccagtgaacacagcaagccccttcagaccttcacagatgaccctggtgggcccacgacattcccagacacagaaatccaacacctgcggagacctaggcagacagcgatgagtgaaacccagctccagtggctgcacctttataaaatatatagtgtaaactgagagtctgcagggaagccatggccctcactccctaaccccatgggaaccagcccatggctaccctggcccagatctctccaggagttcacatctcccatgcccacacctatagtccagccccaccttgttccctccatctccaagacagcccctttccactttcccacctccacacagtactggctggcacttacacattctgacccctctggctggcatctgtgcctatcatctgtgcctctgtcccaaagtcaacctggcacatgaggccacacaacagagcccagtcttggcatatccatcttgggagagggggagttgctgtctgaagcatatacttttacacaagaatcctcttcttgaggggaaaaaaaaaaaaatcaacgagaaatcaagtctcatccagtttggccagggaaagatatccattgggaaagatgggacaaggttaaaaggaggtgaggaagggaaagggaggctatcacacaggtcatggaaatttacgcaggtagggaaggagtaggaaatgaaagccccagtcaggcagctgcaggaagtcaccacatcacctatcctcacatcccagaattcggctcccagccatctctccttctcttacccatgggtcagaggacactggtgagatgaagagagcaaagcattgcatcatcaactggagacaccagatgccagccctgtttctgatgcaccagggctctgctgtgtgggcaagagaggtatccagcctcaagccattgttcctgcctgcaccttccatccttggccagaggatgtctgccagagagcccagcccctgttgtcccccccacccccactccagggtatctgactgcccacatatctctatggcaaccatcctcagactcaaggtacccagagagaaagaaaacaaacaagtccaactttataggcaatgtacacgaacagcaagagatggagctggatgggagtcagcaattagtgccctactagagggatggagagagagtccccagtcagggagtggacacggccctgctaaacaggtcccagaacaactgccaacacgacagaagcccgtggaattgtagagcttctctaagcatttgggacatctattatgtctcttatcccagagaaacccgtgtcattattggccaaagcccatgtcttccccagggcatgtgtcctggctcctaatatatttatggcatcctactgcccagccctaattcctttctctgagtttcacaacctttgtcccccagctgcaccctgcagccctccgagatctgacctctgtactcaccagacctgttcccagagcacttcacacattgctgggtctacacctatcagatgaggtgagtttggcaagtacccaataggaagttcagagagtgtaggttcaaggtgtgaaagacaggccctgaccctccaagcctcaggtacttgggaggatctcgcaagtgaggccccaaggccttggcctttatgctcctcagactcggaggcagtgcagttcctgcccaaaccgggcctttgggatttctagaccatgaggcatcaccctccacccaggacagactacatctgctgctgcaccaccaactttgtaatttgatcaaaaaagcaatcaagttcatctggcagaatttgttcctgagaagccctcgccagtagcagcctcccctgatgtttacagattcccttcccttgggagtctgttctgccgcctggtgggcaggggaggctggctttgtcagagctgctcacttactgcatttccatcctaagtcaccactggggcacagggaccaggaaaggcctgcagtagccaccactgccccaaagggagaggctccaaatgccccaaattaagagctccccattctgtaccacccactacccccatatcctccacctccctgaagaccgaactcccttgagcctttgggggccactgcagctacttgcatctcttccttcattcttttgtacctgggcgcttccagtcccccatgcaactccttttctggcttcagcctgacacaaagtccaaccagtctgaaattccaactcctctccaagtgctaaaacgcacaacccccaattcctggggcttcctcaaaagaaaccatggcccctggaggcaccctcaggaagaggtcaagacagggaacactcaccccgggcagacaacttcttggtattgatgatttttgctgcgtactcctgcgtggaggttttcttcacacacctgcggaccacagagaaagcacccctggagggagaaggggaaaagaactgggacacggagcagggcagagtgacacagacacacttcaagtctggggacgatgatgctcccaccaccagacctctagtcacactcacgtacatgcacacacaccggcgctgtgaccaccaccatccaacatgaggcaaaaggacgcggccaccgcaggacactgaacagatgtgggtggcgtgccgcgctcccaccccctcatccagtccctgggcaaggcaacagcctccacctcaggctgcacatcaggagcgggtgggcgatgctgaaaacacacacctgctgcatctcagacagccctgcggtcccggccaagagaaccagggcagaagggagcagagagaccctgcccttctctcagcaggaacagttgaaggtcggggaaggaaagattaaaaagagggtatcatcccctgaaagagaaatctccctcaaccatggggcaaagtgaggctcaaacccccccacagccggtttcatctcactgcatcccggctcaactgacagcaagggaagagaggacacagtcagacatcaagaactccccttcccatgctattttccttgacgtccccgtcaaacgggagctcgcactctgagctctggaaacgtctgggggggcgggcggggcgggggctgcagtggccgggctcggcgccgcgggtgggggtggggggccggggctgctgcagcggccagctcagtgcggaggggagggggatgctgaggctgcggcgcggctcccgggaccactgcaggggtggggggaggggacgggggtgccgcagcactgcccagccgcggggctgggagcctggagcggcacccgcggggggcggggccgggcgccaaacagcccccccacgcccgggctccgcagcagagctagggctgcagggctggggagggtcctgagtgcgaggcgcgtgggacctgggttcagggtgcggagtgagcaaccgggcagcgttgggaggtggtcgggaggggggcgcctgaagggtgcggaggggcggggctggagggcacccgggagcggtccggggtctgcggtgtccgcggcggcgcgtggggagcagcggccccgccagttgctgcagggcgcggagggggatgcggggcagtgcgcggggggcgcggggaccgaaggcggcgggcgggaaaggcgggggtggggcggccgagggggagccgcagcggccggtgcagggccggggggcggggcgagaagccgcatagctcccgggcggcagggcaggcaggggaccgcggcgggcgggccgtacttgccaagctcctcgaagagctggtagtcgtcggtgaaacgggtgcaggtggcggtggtggccatgctggcgggcgggcggacgcggcggtgcagcccgcgccgacgtcggtgcacagtcaccgccgcccggccgagggagcaagaggaggagacggggctgagcccggcagcaccgcgagactttaccggggagagcgagggagggagggacacccccgcgccgcccgccccgccccgcccccaggccccgccagtccccccccccgcccggcccccggcccgcccccggggaggggcctcccgccgccggccccgccccgccccggagccgccctcgctgggccaggcgcgcggggcagccgaggggagggggtccccgctccgggccacctgtctgggcagacggagctggaaggttcgcgacttatgggcttgtcccggggcggaccccgcgcgggctcgggaacgtgcatgcgagggtgcatgtgttaggagtgtaggagtctggaccactgacctctctggacgggtcctacacgcgggtcccgagcccccaaccgggctcctagcacgtggggagagagccaaggtcaaggagcctgtgccaggctgcacgcccgggaggcgcccccagcctgcgcagagccagctgccagccgccttccctctgggagctgacagtctagacttgcgcaagcaccagggccattattagaaagaaacccttcaggcgcgggttgatcagggagaccaggccaggggcaaggatacaggtaggactctgccttcctgcaccataactgcagagatgaaagagtattctctatccggccagaaatgaaaggggtgaagtaggaagacttgaaaaggctttgtgcagtgggggctagaagagaaagtggaagaaaggggaaatccccattttcttgcaaggcaccctcgtacttttattttctggcacctaccacattttgtagtgatgcattgactggtataaggggcagtagagctatctcatagctgtctaagcgtgaacttgcatcaaactgcctggattggatttctaggcaactcactgatcagctctgtgacctggggtaagtcactgaatcttttttttgagacggagtcttgcgctgttgcccgggctggagtgcagtggtgcgatcttggctcactgcagcctccacctcctgggttcaagcgattctcctgcctcagcctcccgagtagctgggattatgggcgcgcgccaccacgctcggctaatttttttgtatttttagtacagacggggcttcattatgttgtagtaatgaagtatgtatgtagtacatacatgaagtaatgaagtatgtatgtagtacagaggtggcttcatgagccacctcgcccggctgggaacaataatattacctacctcataggcctgtcagcattaaatggtctaaggcacttagaatagtacttggtgcctaattagaactacatttgctgggccgggcgtggtggctcatacctgtaatcccagcactttgggaggctgaggcgggtggatcatgaggtcaggagttcgagaccagcctggccaacatggtgaaatcctgtctctactaaaaatacaaaaactagcttcccgctgaattgtaggctccaataaagcggggcctctgcaccttttgttcaccattgtacactcagcccctgaccctcagtaaatatttgtgggatggcagagggagataccatcccttctcctgtccccaccatcacaagttggtgggacagaggcacataactgtcttgatgggggacaaacaggctgggcaggttcctgacctgcctgggcagctgtcccctgaggctgaggccagccccaactgggcagggtggagctcagccagaggctgccactcagtcttgattacagcaggacgcccactgggagtcgggtctccctcgccagcaggctcgctctgccagaggagggggctgagaggtgtcccagcctcccaagctgcctccctgaggggtgggtggggcagagctctccaggagtgctcccctcctgtcctgacccaacagccctgagagctgctttgggaaccagactgcccagtaggggtgattagggaatgggagggcatgaagccctaaaggaaaagcattagcagttctcttgggagaagggtagagagggccaagggaaagggtagcagtgccagagcaccatgccctacccctccccagggcaacaggaggtaaagtggagagtaaggccacttcctatctcaaagcacctgggtgagagccaggtcccaagtcccagtgtggggtagggcaatgagattgcatacatggggatgccagtaagtgttgagtttctgtcatccatctccaaagcagaagcaactttgaatatcagttgatcatcaatgtgcccttcctaagtgctcaaggcaacttgcttcctgacctccaggctgatacttgaaactttctattcatgaatggaaggtggagtggaggagaccctgagaggtcagaacaagcacagaggagggctgccatggagtcccctaggagtatcctggggcaaatgtaaaacaggactacaaccctgaccagtctcatgtgcctgctgtgagaggaacatcatcccgactgaggggagggttcaacactaggtgttttggggtaaccacgtaaagcattttgcattgtgtctctaggtaaaaggaagagtgatgagaaaaatattggagtgaagcctcaggggtgactcatagtactatataagtggagctagctgcctttcaacaaatatgactccctaccataggtttgtcactgccttttactttttgaaacattcaaataaagtagaaaattagaattcacacaattagaagaaaactcaatccatcgtcttttttttttaacccctcagacagggtctcgctctgtcccccaggctggagtacagtggtgctgtcacggctcactgcagcttcaccctcccaagtagctaggactacaggcatgtgccaccacactcagctagttttacatttttttatagagatgaggtctcacaattttgaccaggctggtctcaaactcgtagactcaagcaatcatcctgtcttggcctccaaaagtgctaggattacaggcatgagccaccttgtccagcctcctttttcctttgtatctctacttcacttttcccttcctccctcactacttctctcaacagcgcagcctctgacgcatccacggtggtggtttggagcctatagacacttctgtgtgcacacacaaacacacaccctcgcacatacaccctcctctatccccactgctgtagcgcccacacaacctccagctaccctacagcaattagagggaagatacacacaaataataacaagctcaccagctccctccacttcagtgtctatggcaacctcctggggtctttgggctgggttgctctggttgcagccagtcccctgggcagcaccagcactcaggctgtgctcagagctcagagaacagggaatgacaaagatatcagtaccctgataagcaccagaggcaccccactgggtgggaccatctttctctttgaagcctgcaaagtctcacgtccatgaggggttttcaatccatattctaagcagaatccatggggttacgaggccaggccgcaacagctagtcaacatatatatattgacgttccacataagatttggttgcagttaagagtccctgactaaaaagaagtttggaacccattggacttctgggtcctttccaactctgagattctatgattagttttggagaattaggagtgatgagatcatgacctctctccaaggaactctgagagaattattaatggtgcggcatttaaaactggagagaagatgtgatcatggagataggaaagagtgagaaagcaaatacaacatttgttttgttttgagacagtgtctcactctgtcacccaggctgtggtgcagtggtgtgatcctaacttactgcagcctctaactcctgggctcaagccattctcctgcctcagcctcctgaatggctgggactataggtccatgccactataccgagcttaattaaattttttttggtagaaatgagggtcttgctatgttgcccaggctggtcttgaactcctggcctcaggctgtcctcctgctttggcctctcaaagtgctgtgattacaggcatgagccactgtaaacacagtatttaaataagcaatcctcacactgggagggagtgaaggatgcccctctttgccctggaaggtacatcagaaaaagcctaccagtgggcttctccaaatcactactttttcccatccttcctgagtctaaaagctggaaaaaaaaaaaaaaaaaaagactgaaaccacagattatgtcaatgagtgcagcatttttttttttcttttctttttttttttaagataaagtctcaccatgtcgcctagactgttcagtggcatgatcctagctcactgcagcttctatctcctgggctcaagtgatcctcccacctcagtctcctgagtagctgggactacaggcacaagccaccatgtcctactaatttctttttttatttttagtagagacgaggtcttgctgtgttgcctgggctggtcttgaactcctgaactcaagcagtcctcctgcctcagcctccctaagtgctggggttacagacatgagccacagcacttggcctgactgcagtatttcttagaggaggggctgagatatttgaggtgagtggctgagctcctaaagtttgggacgtaggagattttggaatgagagtttggggcgagggctgcagcatctggtgtaaggaactgaggtgtctggaatagagtttgaggcactagggatgaagagctgagctgagaaattcaggtaagtgtagaaatatgtaacgtgaggagctgagggcctgataggggggaacttccttacattttccagccagcgggttagttccaaagagcaatgtgatcctggccttctcatccatcaagtccagggcatggccccctctgcctcttgacccctctgccatcctcctatagactgtgagcttcttgaaggcagggcattgctgatctttctctttgtatccccaacacctaccattgaagcctggcacatagtaggtgctgtcatttatggaatgaatgaagtattgggtgcaaggggctgagatatttgcagtgaagaggcagaaccagtggacaaatctgtcatcagagacagtgacagagctgtcatcagaggcacaagggaggtactgatgtgacgacaggcgggcggcatgcgtcagcgtggacgacctgggcaggaagagcggcatgtggggccccctggtgggcaaacgtgaggggcacagggaggtacaggaaggggagcgtcaaaaaaaaatgacaaagggaggtgtggtgaggatgacaaaactcaccagcgtagctaacgtctagagaaagcttgctacttacaaggcacatgcactaagcactctaaataagctactctatttaaccctcaccatcaccctgcaagtgtgggagttttacagaggaggaaactgaagtttagaaaggtgaagtagcatgtcccagggcaaatagctaacacaatttatggtggagctgcgagaatatgattgaagggcagtgaatagaaagagataggggggtcagtaaattgtatggggagcaatccagataggctgacaccaccaataccatctagattggaatcttaaactcagtgtggatttatctcaatctagtcccagcctcctgaatccaggcatgtacccacaggggacatttgttcattcattcattcattcatttattttactgagtagctcctctgttacagtcatttaggaaacagaagaggagaatccagcaaaactctgcctcttgtagcttacatccctgtaggcaggcagtgtaactggaaagaggtcattttggactggagttaggtcctactacagagaaagtaaaatcaagtaatggggatagagagtgacggggtagggaacatagagggcgcctttaaccgaggtgctcagacctgggggctctctgaacgcaacttttaagggagacatttaggaataacatttagaaatgatgataaggaggtagttgtttgaagatccaaacaagagcattcctggtggaaggggcagtgacaaagtcctgagataaaaaatggtcatggtcccagctactcgggaggctgaggcctgaggatcacttaagcctgggaggcagaggatgcagtaagccgtgatcatgccactgcactccagcctgtacaacaaagtgagaccctgtctcaaaaaaaaaaaaaaaaaggtcatggcatatttgaggggtggaaagaagactggtgtggccagagtgggccagggggcagcaggaggagaatagggcccagaggtcgtaataaaccccacatcctggtacaaccaccctgatgttccttctgtggccccaaactctgtaactcgcagggagcccacaaggacaggctacctccatgctcacaaacaaaggagacctgaaatcccagctcagtgcaagaagacaccttcatcaaggacagacataaatctgggtctggagctagaagtgatgctgttccttggcccctggccaccacaaagaagggtggtagagatggccacaggatgacctgtctgcactccagggactctgggggtgatgcactgggggtctctgcagaaacaggcagtttccccttagtccattcaaacaactgtctccctgccctgggcaagctttattcttaacccctccagcggacagcaacaggccagaaataggccctgccttaaagagctttactcactggggacaagaagataaacatgataataaaacaaggatacaagccccaagattaataccacaggcagcctctggatctttgcacaagtggctgcctgactcactcttcccttccctctttgcctgtctgtcctccaggtctctgcccaagcagcattttctcagggtaactttccctggcctcttgatcagatcaaatttgtatcttgacagccccaaaactaccacctgccacttcttcaaagcactcgtcccaagtgtatacaggtgtttctatgactacaggcataatgagggtagggtctattcctgtttatgttcatcctggcatccccaggatctaaagtgcctcggctgtagtaggtactcaataaatgcttggaaagtaaaagcaaagtatgatgtaaatgggagtaatggaatcagttggaaccatcagaagtgacttaacagagaggaaggagaggaaggatgttggtggatagaggtggagttgaggtggcaatgccagtggaaaacacagtgttgaggtgctgagggcttggcaggtgtttgggacatggggtggtcaggagaaatggaggggagggggtgaagaggggagaaacaggccataaagctgggaccagccatgtggaaatcgtgcctggctgtgggtgggctaacaggccaggcagggacttgcctcaggaaggacccatgtcaggccgggcatggtggctcacgcctgtaatcccagcactttgggaggcccaggcaagaggatcacctgagaggtcaggagttcgagaccagcctggccaatatggcgaaaccctgtctgtactaaaaatacaaaaattagccaggtgtgcgggtgttcgcctgtaatcccagctatttgggaggctgagacaggagaatcacttgaacctggaaggcggaggttgcagtgggccaagatcgtgccagtgccctttagcctgggtgacagagcgagactccatctcaaaagaaaaaaaaaaaaaaaaaagaaagacccatgtccaactctctggactccaggcaaggtccagaggctgctaggtcccagacctgagctacaaatgatccccttccagacattcccacttgaatgtcccactatccacccaaattcaacatgatccccatccaaattaaccacattgagaagctggataacatggtggttaagaacacactagccatgggagcctgtgagcatttcttttgttttttgtttttgagacatggtctcgttctgttgcccaggctggagtgtagtggtgcaatcacagctcactgcagcctagacttcccaagctcaatctatccacctacctcggcctcctgagtaactggttctacaggtgtgtgccaccatacccagctattttctttttgtattttttgtagagacggggtttcaccatgttgcccaggctggtctcaaactcctgacctcagtgatctgtccgccttggcctcccaaagtgctgggattacaggcatgaaccactgtgcctggcctgtgttttatgacttgtctgcgcctcagttttcttactggcaaaataggaatagtagtactcacttcatagacttttttttttaattagcatctaatttattttcactggcaaaaaaatgtatatatttatcatatacaacatgttgttttgaaatatgtatacattatggaatggctaaatgcagctgattaacatatgcatacctcacatactgttttttgtattgagaacactttagaatcgactttcttagttattttcaagaatacagtacattgttattaactatagtcaccatgctaacttatttttttttgagacaaggtctcgctctgtcgcccaggctggggtgcagcagcatgatcctggctcactgcaacctctgcctcccatgcttaagttggtattacaggtacgtgccaccagactcagctaatttttatttatttatttatttatttatttatttatttatttatttattgtaattttagtggagacagagttttgccatgttggccaggctggtctcaaactcctgacctcaagtgatccacccaccccagcctcccaaagtgctgggattacaggccactgcacccagccaatcactgtgctgtatctcctgatagatctcttgaacttattcctcctatctattgataggattttatgaggaataaattatcagtataagtgaagggcaaaacagtgcctggaatagtcagggctcaataaatattagccattgtaactataccccttgccaaccttgaccagttttcttctcaggttcccttggctctgacagtgacgtgactagttgctgatgacctaggttcagaatcttggagtcaatcttgactcatcccttatctcgcttagagggcagagctgggtttgaattctgggactgctgcttactattaatacttgtgcgacctgggcaaggtaactaagctccctgagcttcatgttcctcattggtaaaataaagatgttgtaactttcactgtagggttgttataataatttaatgatagtatttgtaggtgaatggttcgatgcctgatgctaaataaatggtacttgttatcattatcatcctgtatatcattaggaactgacacctatatatttttccctttacatgtccttgtatccatctcttcttttttatttccctcccaccatcctggactaggccttcctcagcctcccgagtttctgcagtagccctccttctaactttgctgacccattttattcattttcctctttctttttctctttctttctctaccttttttttatttcctccctccctccctcctttccttcctttccttcctttctttccctttcttcccttccttccctcccttccttccttccctatctctttttcttcctttttaagaaatattggccaagtgcagtggctcacacctgtaatcccagcactttgagaggccgaggtgggtggatcacctgaggtcgggagttcaagaccagcctgaccaacacggagaaaacctatgtctactaaaaatacaaaattagccgggcatggtagtgcatgcctgtaatcccagttactcaggaggctgaggcaggagaattgcttgaacgcgggaggcggaggttgcagtgagtcgagattgcgccattgcattccagcttgggcaagaagagcaaaactccgtcttaaaaaaaaaaaaagaaatattaatgggacattgtctcagtgctggggatatagtagtgaacaaggctggtcgcggtggctcacgcctgtaattccagcactttaggaggctgaggcaggtggatcacctgaggtcaggagttcgagaccaccctgaccaatatggtgaaaccccgtctctattaaaaatacaaaaattagccgggtatggtggcgtgcgcctgcagtcttagctatttgactgagacaggagaattgattgaacccaggaggtggaggttgcagtgagcagagatcacgccagtgcactccagcctgggtgacaaagcaatactctgtctcaaaaaaaaaaaggagtgaacaaaagaggtgatgtccctgccctcaggaagccactttgggaggcacttgaggtcccagcacttgaggtcaggagtttgagagcagccttgccaacatggtgaaaccccatctctactaaagatacgaaaattagcagctgggcacagtggcttacgcctataatcccagcactttgggaggccaaggtggaaggatcacgaggccaagagatcgagaccatcctggccaacatggtgaaacctcatctctactaaaaatacaaaaattagccgggcatggtagcgcatgcctgtaatcccagttacttaggaggctgaggcaggagaatcacttgaacccgagaggcggaggttgcagtgagccgagattgcaacaatgcactccagcctgggcaacagagccagactccgtcccaaaaaacaacaacaacaaacacaaacaaacaaacacaaataataaatttcttcttttttttttttttgagacggagtctcactctgtcgcccaggctggagtgcagcggcgtgatctcggctcactgcaagctctgcctcccgggttcatgccattttcctgcctcagcctcctgagtagctgggactgcaggcgcccaccaccacgcccggctaatttttttgtatttttagtagagatggggtttcactgtgttagccagaatggtctctatctcctgacctcttgatcgccccacctcggcctcccaaagtgctgggattacaggcgtgagccactgcgcccggccacaaataataaatttcttatgttgaacatagattgcttgaacaacaacaacaataatgccatattttctccctactatctcattttaatcatcataacaaccctaagggtaagttttggtattctcattttacagatgagattgcgctgattctctgaactcaccccttgaaatggttggcacctaattatgggcttgctgtttgctttcttaaaattttggttttaacttctcatttagatcataggtcccttaaaagcagagccctagtcttctcctccttatatctccttctcctcatatcttgtggccaagcactgtgtgctatacacagtgagtgctttttaacgggtctgtccgttggatggatcctgttctgatatgggccgcttatattggtggtggtgccatcttgaatgctttccactctgggcccaaggatggagaacctggagatggtgcgggccacagaagtgaggaggctaggtctccaccccaaacgggcagtgattctgcttgtccactagaggccgccttagacccagttttagagagccggagagctaccagattactcagcccactccaccccaggggtcatttccagcaccaagtctgtcttagaacccaaggccccacagtccattattggtgcctccagctatggtttcttccagtagatcactagatctcagacatggaatgagctccagaataaaagttgctgatgccagctagataacaggagtgttctggcaggttccaggtgcccctcaatgagccaaatcaacaaatgtatatggggcacccaactgagcaccttctgtgtactaggcagggtgctatactctgggactagtttggtgaacaagacctcccttctctactctcccagctcttatgatctaatgaggtacacagacaaatctaaaatcaatgcattgtgtgataaactgctgacatgatttctcctccagggttagttctctctatgtctcatttcactgtgaattatcccatgagacacctacttgctttagggcaaggaagtaaggccagaagcagagaaaagaaaatcatccacatttggagaatcactgcagaacccctcctttcaggaggtataaggatctccagtgtcttctggtagatctgagggcatctggggctggagtgggtgctggggacaaggaagtaccaggccacctcgacacagccttcctgctcttccttctccaggtggcctgggagctttgcttgggaagtgaagcagattccccagactttgggttgtgatctgcctgcttactttctcactgatttatctttgcctctttttgtttatttatttcttcctttttctcagattatctgtcagtcaacatgtttgtcaaatgaatgtgatattcagggcactctttttcactcagaagcatgaggtcaaggaagtcacaacagagttggggagataagatacagagggatagagacagactcccgtgcagtgccgcatttttctaagtgcaagttgtggctgcccgtggccatttccagggatagatccctggggtctgagggagtccgggaaggcttccttcctggaggagctctcagcctgcccagtggtgagtttctgtgtgcgggtgttttcagaaaagacagagaagagtgaaacatcccctccacccagttgttcattccgctgtgcctggacaagggtctcagaggccccagtgctccacattcctgagaagcagcttctgagtcagagccccagaaacagctgaggcggcttcaggctggagtcttggctctgttttcctccattctgtccaaaagcaactccctccgtagctatttggatgtgaccagaaacccaagcagggccctggggtgggagcctggctcagccaaagtctataaaatggatttgttccctgcattccctccagggctgcagccgtcaggtaaaggtgggtgcccagtgacacctgtgccagaaagcccaaggggcaggggagactcaccctgtgcctacaagttacagcccccaatgcagctattattgggttgcctccgggaagggggtcgtaattaggatttggcttaagttaagacagcagcattccctgggcaatctgccagcacctcctcactgcctgggcgtggggcccaggacatgccagggcaatgccagagagctgactcagggggcggcattaggggaacagaaaaacccttcccacccgccagccaagagaggagatgaagctgcctgggggcccgctgtgatggccctgcatgcccagaccactagcaggctgtgtatggggtcacttctcaggccacagagccatgaagccccatatttcctggggccatcagcagaaggccagggctccccattcattctctgagttcctttcttcctgcaaagacctctagctatgcaggtctaggttccccaaacccctttctacattgatgcaggccctgccattgccactttcttaagactgtgaccttgggcaagtcacttacctgggtgagacttagattccttatatttaagatgcgatgaagaatatctgcttgcctcatagggctgcagtaaggatcaaatgagataatgtctatgaaggtatcttgtatattataaagcacatttataataagggtattattgttgtcatcattattcctgagacagaaattatagcctctggctcctgaagctcaaagtcctcctctttgcctcctttattctgacaagttgctctgaaacccaatgccataatcttaaaccagtcttgagcctcggaagcattgacacccgctcttctgcctggtgctatggtgccagctccgggaagcaacccccatcaccctagctctgttaaaccggttctttctcttctaatcagactcctccagtccagtttgcctgcaatgatgacaaagaaacctaaaatagcacaggctctgcaaacactgctagaaactgagcttggggcataaggtgctgtctgtcacccatgggcccgtctgggcatcccagccaggtgcagccctctgccctccagggtctggcctatcttcctttatgcagccccaggatgacagttcctcctgtcagcactttgtgtggctgaattggatgactacctagaaagctggcttggctagaggtgccagaggagggggcttactgctccctcgaccaggtcctcacccctgcgctcttgggaacttccctcgtgccaagaggccaggtgagctgagctaatatcacagggaacagcagctgcaactgtggccccagggaaggttgtggactgggtaccggaaaaccctgattctgaggaccctgtgacgagcaggccctggcttgtcattgtgactacagaaccagtttagtgtgcagctgctggagtgcctgcctgtgggccactgggcctagctaggctctgggatttcccatggggccttcatatgacttaccctggtgggtgtggtggctgccaaggcctgattcaaatgaggaagcttgcagcagggagccacgggcatttcttgccgctctagcagaacactcatcattgcctagtccttctctaattgacccgatgttaagtcgccatttgcatgtggcacgagtctctacctttagaactttctcatccagctcttttgttttcttttctttccttctttctttctctttttcttttcttttcctttccttcccttcccttccctccccttcccttcccctcccctcccctcccttctcctccccttccctcccttctcctccccttcccttcccttcccttcccttcccttttctttgtctcatcatctccctctgtcgccccaactggaatgcagtggcgtgatcttggctcactgcaacctccacttcccaggcccaagtgattcttgtgattctcctcagcctcctgaggagctgggattacaggcacacgccaccatgcctgactaattttttgtatttttagtagagacagggtttcaccatgttggccaggctggtcttgaactcctgacctcaaatgatcctcctgctttgtcctcccaaagtgctgggattacagatgtgagccaccacgcctggcctcatccagctctttcttttttttttttttttttttgagacagagtctcactctgttgcccaggctggagtgcagtggcctgatgatcttggctcactgcaatctccttctcccaggctcaagcgattctcatgcttcagcctcttgagtagctaggactacaggtgcctaccaccacacccagctaatatttgtattttttggtaaaagcggccaggctggtcttgaactcctgacctcagatgatccacccacctcgggctcccaaattgctgggattactggtgtgagccaccgcacctggccatcctccagctttttctaaaacaccttctttagtacgtgtgttcctttgctgggtggttactataagaaagacagatgaagtattagcttatgtcagaatcccaaactgatggtctgttggtcaaatgtagaccccagacctgattttgttaacatgtactgttttaattgggaaaatttaacattaaaaaatccaggtttcagctgggcatagtggctcatacctgcacttccagcactttgggaggccgaggcagaaatatcgcttgaggtgaggagttcaagaccagcctgggcaacatagcaagaccccacctctaccaaaaaaaaaaaaattagccaagtgcagtagtgcgtgcctataattctagctacttgggaggagcatcccttgagccaggaagtcgaggctgcagtgagctgtgattgtgccactacactccagccttcgtgacagaatgagaccctgtctctaacaaaaccaaaatcaaaacaaaacaaacccagatttcaaatatcttaacatttggtgtccttaggttgatttttctcagaagcagaccctgctacaaggcttcagtaccaagtagtttatttgggaggggggttcagtaccaagtagtttatttgggagttaattccaggaaactgcagtaagggagtggggaagtgagacagagaaagaaagtgggagctgggtgcagaggttcatgcctgtaattcgagcactttgagaggccaaggcaggaggctcgcttgagcccagaagtttgagacaagctgggcaacatagtgagaccctgtctctacaaaaacatttaaaaattagctgggcgtggtagcacatgcttgtagttccagctacttgggaggctgaggtaggagaattgcttgagcctgggagctgtgattgcaccactgcactccagcctgggcaacagagtgagaatgtgcctcaaaaaaaaaaaaaaaaaaaaaaggccaagtgcagtggctcactcctgtaatcccagcactttgggagaccaaggtgggcagatcatttgaggtcaggagtttgagagcagcccggccaacatggcaaaacactgtgtctacaaaaaatacaaaaattagccaggcctggtgacgggcacctgtaatcccagctacttcggaggctgagacaggagaatcgctcgaatctgggagacggaggtggcagcgagctgagatcacgccactgcactccagtctggatgacagagcaagactccgtctgaagaaaaaaaaaattacagaaaggaattgagacagtcaataagggtgaggtttcaaggaaggagtatatgggcagctggagcttaattttcctggagaactctgggaaaagtgtccaacatgtatctcaaagttttctcacctgagaggcaagggcattagggtatttatccaccaaactcatcagtcactggttgggcgctgatgtggtgtaggggaggaagggtaatggcagtggtaactcctggggaacttccagcctactgtgcaggagggaagagtgggctccagaggccagaggaagctggcactgacaggatctgctacaatacagaagacctagcaaaactggtcttcagctcccacgtggcaataatcagtgaaagctgagcagcagttgctcctttaggaaagtcaagaactgcactcagcctgcttccctctttatattacctgtacagcttcgtgggtgctcacgttcacgactcctggtttatgtctgtgtgtagtctactccactacagctctgaatcccactgtctctgtttccaatagtttgtttcctattcttctatgcattacatgatacagctagcccagtgattccaaaatatgttgacttgctgggcacagtggctcatgcctataatcccagcactttgggaggctaattcggaggattgcttgagtccagaagttcaagaccagcctgcgcaatgtggtgaaaccatctcttcaaaaagaagaagaagaaaagagtacaaaactagccagtcatagtggtgcgttcctgtagtcccagctactctggaggctgaagtgggaggatcacccgtctgggaggtcgaggctgcagtgagctgagattatactctagcctgggtgacacagtgagaccctgtctccagaaaaaaaaaaaagaaaaaaagaaaaaatgttgactgattatttttgtttctctagccctgcaactgaattatttagctccctgaatctcagactgccttccctctatgcagttaagtgcactgtgtcagagcatgtgaaatagagcctcactttgaggactgatgagaggaggcccttcgttatctctttgacgtcttgtacctgactggctttcagttcctacagtgctctgagttcctttctgcctcatgtcaactcctctgcctgggaagttctttttccccttacgacaggctccctcgtggccattcttcaggattcagtgtcaatgtcacctcctcagtgggatattccacttcatccgctcctccgcccctcaccaggttatgtccctctgctgtacattcgcacaggccattgtattccttcttagcatattcactatcattccttacatattggttgaatttgtatttacactgtggttgcatcatgaatgcagtttacttactcaaacccgaccacacactcagctgaaaaagcccaaaacaaagaaattcctttatttagagtcacatgccaccgttaaagccagatcttgacagctactgccccagggtcacaaccaaagtacaaagagaaatagatgttatttctcggcttttgtgcttctgaatgcctaggtcctggtaatgtaagggatttgcaggaataagttggctatctttatgtcccagactgattttagaatctgccactattcccataaatgcagaaggtggaaatccattgtattatctggctcccctctgaattgaagctccacgaggacaggttatgggcttgcctttatcattgctggatccccagagtctagcacagtgctggacacatagtaagtactcagtacatcttgggttgatggataaatgatgctaggtggatgacggataatggatgatggatggaagagggatggtcagagccatgaggaccagcacagtgcaggatgtccctggagataggctaatacttgatccgacttaactactgggggtggggaagaaggatgaaggaaatgagatggttgcactactccaatggaacggacttgccaaaggcctgtacttttgcagatctccaaggattttttaaatcccacgctctactttcccccaaactaagatcatcggattagagccttaaccaaggcagtgtagccgccgctgagtcactacacagtcctactgtaccccctcggggctcagacagtgggcacctcccagtttggattcctatcctgacccaaaaaccccacccaactccctgctgtgaccttgctccttatactttccctgtcctcgcccaaagctttgtttgaccccagtgccaaccctgatcttgatcacaattgcttttacagccctggtgccgatcccagcaatcccaaccttgattcccatatatacatattttaaaaaaatgtttggagactggatcttgctatgttgcccaggccagtttcaaactcctgtcctcaagtgatcctcctgcctcaacctcctgagtagctgggactacagatgtgccaccatgcctggctttgattcccatcttgaccctaaccttggcccaggtatgtctttgcttctgatcctgagtaccttgtacatctgtgcatctatgcctttttttattattagttttggctatttataaagcttttgcacacattatttcatttgacatttacaactttacataatcatcctatcttacacacgagaaaactgagacttgtgaaaaatgcctaaggccacacagctagtaaatgggggaaactagatcagattcaggtcttccagctttaaatccagcactacaggagcctgggtggctgaagctccccatataggtctccgttgcccttgtgaagccatgagttcaaaaccagcatgggtaacagagtgagcaaaacaaaggatctcggggttctaatagtagtggtgataacaataaccttagcttactggggaattccctcatgacaagcagagtgccaagaagctcttcatgcaccagctatcttatccccacagcaatgctatggagcttgatagccccatctcacagaggaaaccatggcttatggaggttaacggcttatgtgtttaaggtagcacagctaacaagagtttgagccagagtttcaacccaagtctctctgactttaattgcagttcactccaatctttataaagaaatgagatggggcaacaggaagcagctggagcccagtcttctaaccatgggcccgccataccttttgagctgtagtgccaaattccagggtattgtgtttgatcaccaaaactgggttaaaaatgagtcaagccttggcagaactgactcactgtggtgtctgtcagctctaaaaggagacaggaagcctcagagggcaactgcggactgaccagtggccagtggaagaaggtctcagaagcatcctaccgcaaaccctgtgggtgataaacacagaaatccatgtgcctgccaaagaaaaaaagactcagactcaaagttcatttttaaaattagacctgccagtccccatttctttctccatactcaatgttaaattgtattagatgtgatattattgtggttatttatgagaaaatttttgttcttaacagatataaactgaagtgtttggggtgaagtgtctcaatgtcttgctttcaaattgctaaagaaaaaataattaaaatgaggtgcatacacatggccaccccgtgtggagggggcaggagacagagaaggcaattatgaagaaaggtgaaaattgtcagccctatccgtagcagaactccatttgagtcaacttctctttctttctttttttttttttttgagacggagtctcactctgtcccccagactggaatgcagtggtgcaatctcggctcactgcaagctccacctcccgggttcacgccattctcctggctcagcctcccaagtagctgggactacaggcgcccgccaccacgcccggctaatattttgcatttttagtagagacagggtttcaccgtgttagccaggatagtctcgatctcctgacctcgtgatccacccgccttggcctcccaaagtgctaggattacaggtgtgagccatagtgcccagctgggtcaacttctctttcatctctaacactcacacttgatccttgtcccttgccagcaggttctttatctccatcccagtccccacccccatctcagttcacatcactgaatgtcgttgctgctgtcttctcacgtctctgagtctcagtctcagagtctgctagatccttctgttgtgggatccttttgttttgggtaactttttttgtagcaaaatatatcaacataaaatttaccattttattttattttattttatttttattttttgagatgaagtctcaggcactgttgcccaggctggagcatagtggcaccatcttgactcactgcaacgtctgcctcccaggttcaagagattctcctgcctcagcctcccaagtagctggaattacaggcatccaccaccatgcttggctaatttttgtatttttagtagatacagggttttcaccatgttggccaggctagtcttgaactcctgaccttaggtgatccacccacctcggcctcccaaagtgctgggattacaggcatgagccactgtacccagccaaaatttaccattttaaaaattattatttattttattgtggtaaattatacataacataaaatttacttttttttgagacagattctcactctgtcacccaggctggagtgcaatggcatgatcatggctcactgaagcctcaacctctgggggtcaagtgatcctcccacttctgtctcctgggtagctgggaccacaggtatgtgccaccatgcctggctaattttttgtagaaatggagtttcactatgttgcccaggctggtctcgagctcctgggctcaagcaacccacctacctcagcctcccaaagtgctgggattacaggggtgagccaccgtgcctgccacctaccctgccctactttttatttatttattattatttattattattattattttttagacagagtctcactctgttgcctaggctggaatgcagtggcgcaatcaagcctcaaactcctgggcttggccgggcacagtggctcacacctgtaatcccagcactttgggaggccaaggtgggtggatcgcctgagcacaggagttcgagaccaccctgggcaacatggtgaaacatgtatttctctactaaaatacaaaaaattagctgggcatggtggcatgcgtctgtagtcccagctactcgggaggctgaggcataagaattgcttgagcccaggaggtggacattgcagtgagacgagatcgtgccactgcagtccagcttgggctacagaatgagactctgtctcaaaaacagaaacaaaacaaaacaaaacaaaaaccaaccaaacaaacaaacaaagaaaactcccaggctcaaacaatcctccacatctggctaattttttaaattttttgtaaagacagggttttgctcactatgttgcccaggctggttttgagctcctggcctcaagcaatcctcccacctcagcctcccaaagtgctgggattacatgtgtaagccaccacacctagccaaaatttacctttttaactattttaaaatgtatatttcagtgacattaaatacattcacattgttgtgtaaaaatcactgatacacattccagaactttttcattatcccagacagaacctccacctgtaaataataacttccattccccttcatcctcaccccctctaaccaccattctattttctgtctctataaatttgcctatgttaagtacctcatgtaagtggaattatacaatatgtggccttctgtgtctggcttattgcacttagcataatgttttcaagggtcatccatgttgtagcaggtatcagaatttcctggttttttttttttttttttttttttttgagacagagtcttgctctgtcacccagactgaagtgccgtggcgtgatcttggctcactgcaacttctgcctcccaggttcaagccgttctcctgcctcagcctcctgagtagctgggattacaggtgtgtaccaccatggccagctaatttttgtatttttagtagagacagggttttaccatgttggccaggctggtcttgaattcctgacctcaagtgatccgcctgccttggcttcccaaagtgctgggattacaggcatgaagcactgtgcccagcccagaatttccttcctttttaagactaaataatatgtcatatatgtatatgccaagctttgtttatccattcatccattgatggacacttgggttgcttccaccttttggctgttgtgaataatgctgctatgaacatgggtataaaaatatctgtttgagttcctgctttcaattcttttgggtagatacctaggagcagaattgcttgatcatatggtaattctatgtttaacttttttaggaactaccaaaatgttttcaacagtggctgcatcattttacattcccaccagcaatgcacaagagttccaatttctccatattcccaccagtgcccttttttttttttttttttttgagacggggtcttactctgtcacccaagccagagtgcagtggcatgatcatagttcaccgcagcttcaaactcctaggctcaagtgatcctcccaccttggcctcctcaagtactgggattgaggccaggcacggtggcgcacacctgtaatcccagcactttgggagaccaaggtgggcggatcacttgaggtcaggagctcaagaccagcctggccaacatggtgaaaccccgtctctattaaaaatccaaaaattagctgggtgtggtggtgtgcatctgtaatcccagctacttgggaggctgaggcatgagaatcaattgaacctgggaggtggaggttccgattagctgagattttgtcactgcactccagcctcggtgacacagcgagactccatctcaaaaagaaaataaagtactgggattacaggtgtgagccactaagcccgaccaccaacactttttcttttctttttacttttgataatagccatcctaatgggtgagaggtcataggtgagatcgtttttgaacacaatactccagatgcctgagtgtttcaggctccagggtctgcttctccccctgagaccccacctctcccagctctgagagctggtgtttccctgtggtggcaaaatcacccttgcagctgagcagccaacatggttctttctcctgcaccctctggtttcttccaagctctgaagagctggctatctctctgccttccacttatgtagggttggactgagaaataatacaggctctagggagaatactgactctatttctgagcccacactcttctgaacttctttttccacatagtcttccagaccagaggctactgtgctgactccatggaggccagctatggctttgacctgccactgacctcagaactagaacagcatccaaagtcttgggcaaaactgtttcttggtcccataaggacccaggggaacatcttatattgctctggctacaacccccatgctatttgaatcagccccttcctttgctgaagttcatatctgggtttaggtctccaagacagacactgggtgtggtgattcaccctgtctaatcctcatgactcctcaaggggaacttggagacctggaattttggtcaggagtccctgttcatattcccagaacccaggctctctggggtaacatttgtttatgttgtttaatagttacatcctctccatggccttctgatgtcaagagcaggccacgtcaaacctggcccccatgttcatgtcaaagctggcccctatgggctacagacgtcccaggctttgcttcagcccaggcctcaccccctttgcttacaagtacctgatgaaaatttctttttcttttagctgattctgtcttctgtgaaagcaggtggaaaagacgttctgctgcattccacagaagggaaaacaggcatatggagggaagtgactcagccaggttcatggatggagtcagccaccaagccaggaatggagctctatcctctgactctgaaaccacagccttcaccacggcagtcactcctttcctcaagaggaagcttcagctcatgctcgcagatatggcctttggactcaacaggtgctactggcattgggcagtggggctttctacccccggttcttcccactccaatccaggagactactggccttcaaatatggatttcatggtacagcactttaaaggaactttctaagacttcctttttttttttttttttttttttttagacacagttttgctgtttcccaggctgaagtgcagtggcaccatctcagctcactgcaacctctgcctccccgtttcaagtgattctcatgtctcagcctcccaagtagctgggaatacagccacctgccaccacggccggctaattttttgtatttttagtagagatggggtttcaccatgttggtcaggctggtctcgagctcctgacctcaggtgatctgcctgccttggcctcccacagtgctgggattataggcgtgagccaccgtgccaggcctcgaagactctttctaaagcaaagcacatgactttccaagtttggaaaatcaaaagcccctaaagataggaaagatgacagctgtacaagtcctcatgccttccgttgcactctcacttcctctctcggagtcctctcatttcaattcccaattccattactgcaccaagattctggggttcatgctccccacagcccaagcacagacaaatttcaaatcactgtcttttgcttcctatatttcaactgagattgatggagattttcagttttactaaacttaagcacacccttgctcaagaacctgcagtacctttctggagtctatggaatcaagtgcacacttctagctgcagtaagatcttttataatctgacctcactctagttgaacttagctctcatgcaatgtaaaccttccctaatcaagccagacttctcactgcttgtgcatacatctacacacacacacacacacacacagagagagacttaaatacatacaggtttattctccacaacacgtaaaaatgtttattcctagctcctgtctctttccaggggtcttacctggaattcttgtttcctgccctctgccaatcccaacctcacccatcttttaagatttgttcatgggtgagcgcggtggctcacacctgtaatcccagcactttgggaggctgaggtgggtggattacttgaggtcaggagtttgagaccagcctggccaacatggtgaatcccgtctctactaaaaatacaaaaagtggctggatgtggtggtgtaagcctgtaattctagctactcaggaggctgaggcaggagaaatgcttgaacctggagatggaggctgaggcaggagaaatgcttgaacctggagatggaggctgcagtgagctgagatcatgctactgcactccagcctgggtgacagagcaagactctgtctcaaaaaaaaaaaaaaaaaaagatttgttcaggaagccaggcatggtggttcatgcctgtaatcccagcactttgagaggccaaggtgggcagattgcttgagctcaggagttcaagaccagcttgggcaacatggtgaaaccccttgttctctaccaaaaatagaaaaactagccaggtgtggtggcgggtgcctgtagtcccagctactcaagaggctaagcaggagaattgcttgatcctgggaggcagaggttgcaatgagccaagacagcgccattgcacaccaacctgggtgacagtgtgagaccctgttcccctccccgcccaaaaaaaagattagtccgggaaatctctaactttagtgtctccagtctctgaacttctgctgcgtttgtggctgataggctgcttaatgattaacaacttttacaaaaatcttggtaaaaattacataatatttaccatctttataattttttatgtgtgcagttcagtagtgtttagtacatttcgcttgttgtgcaaccaatctccagaacctttttttttcaagacggggtctcactctgcctcccaaagtgctgggattacaggcatgagccaccgcgtctggtccagaacttttacattttgtaaaactgaagctgtatacccacccattgaacaataactcatcatttcccccttcctcagcctctggcaaccaccattctactttctgtttgtatgaatttgactattatataaaatataagtagatttaagtggaattatacagtatttgcctttttgtgaccagcttatttcacttactatgctgtcttcagggtttattgaagttttagcatgtgatgggatttcgttcctttttaagactaatattccatgtgtagatatgctgcattttgtttatccatttatctgcgtggacatttgggttgcttccccctcttggctattgtgaacagtgctgctatgaacaaaggtatgcaaatctctcatcaagaccctgcttttacttctatatctagaagtggagttgctggatcatctggtagttctgattttttgaggaactgccatatatcagctgcacaattttacaatcccaccaacagtgcacaaggattccactctctccacatgatcaccaacacttgttattttctgtttattttttctttatagttgccatcctgtttaaagactttttcattgtttcatgtaaattcattttgtcttcctaacagatttcatgtgtcttcagggcaggaatcttgccctgttctcctgtgtaccctcagtgcctagcaccgcatgaggcatgtccttaggtgtctgaaggtcctttttggttgattggatgaaatgaacagtttgagttgagcttagtccttttgagaacttagggtagaattccctttacaaacagaacaagctgactgctatgatacagactgaatgaatcttcaggacactgctgcactgtggagcaaagtctgcatggggacagtgtcactgtcgcttcctctttgactgaagatgcaatattgtggtcatcacacaagctgctgggtctactctccctgcaaagcataatgctctggaaacccaattctatgcaggtagaatcagaagaccttagaaataaaaacaaaaccaaaaactgaccttgagaagctcagaggagggccagtacgggaactgagaggaaacatcacagatagacaggtactagtaggtacagctattctcaactct

SEQ ID NO: 18 - DNA, 70754 bp, Homo sapiens
gtagagttcagtcgggatgcttagagcatgacattcaccaaggtcatctgggtggtgacagaggcctcccaggagagaggcccctgctagagtgggaagccaggggtgtctggacttgccagggcagagtgtgcacgtttctccagtccttgcagagcaggctggccccagcccctcgccctgacagcacctggtctgccagctgtgagggcaggctgcctgggtggtcctccccacacggcactgactgggttggagaaggcccgagaggcttggatgggtgagcatggaggggcagaggatgtgggagtagggctggggaggaccctcactctggctgacccgtcagtggtctctccaaactgcctttccatcacatcccaacagggcctcctctctctcacccatgcacccccttccaggacaccctggtcctcagctcccactccccagcagggaagcaccagatgggggcatttgctagggaaatgtacccaaatggcctagccacccactggcctcaccactgccgaggcccggaagagggaaagcatgcaaattcctccagcttccaagctcagaaatcaggatggggatgcaggtccactctggggacctcaggataggggtcaggcccactcaccagaagcctctggacagagggagccaaagcacgttctccggatggccctgggctgagggcagatgcgtggctctgccttcagcctcagttgggaagatgccccccacacctcggagctccacctgagcagaggccccattttgagaggtagggggatagggccctcccagagggaccttgatctgccagggagacccagcgtgaagccatgcggcccctcacctgggagatgcagcggaggtaacgcacggccacctctcgggccaacagccagtcgccatcgtagatctcagggcagggcacccgggccagcaggcgggcgagctcgggggcaggaaggccgggtgccaggctgccgttgcccagtgcgctcacgggcacggcagtgcagaaggcacagaggaagcatttgccgtcgagtagcgtgacggccacccagacgacaggcgcgatgagggcgcgctgggccatggagcagaacatgtagcgcaacacagcggggtccttggcccggcggcccagcggccgcttccactcttcggccagcatggacacgttgttgttcatgaccaggccaagcagaaagagcaccaggggtggcgccagcaggatgcccgcgctgtaggctgcattgtagcccggcaggcaggggcagttgaagtcgaaggccgagtacatctgggcactggccagggccatgatgccacagatgccattcatgaaggactcctggttggactgcaggaactggaagatcatccggaacttgtccatcatgcccgctgtggggcccggcctcctcttcccaactcactgctgcctccaagagggcccctgctgcccaccctgcccactgggtgcccacctcatgactcgggctctcctggctgggaccaacagagctcagagcagaggctgaggtcactgtcgctttgaggaatctttagtcaggtgctggctgagaggatgcagattgaccaatcctgtgggttcagccagggctgtgcccctccctcctgggcttctctctctctgcagccgcctccacctccggcgctagcacctgctagagaccagctttctgtgggtgtgggagggagggagggaggggcgggagagaaggctcagacacagactgggaagacactgtctccagcagggctggagtttggagagtccagggctgctgcaggggcctgaggtcctggaccttgtcttctgggctcctaggaagctcatcgccctccttttgcccttcccactgggggtctcctccatgctgtatcagaatcctagagggctcctccatcagttccccgatgacggtgtggtgctgcggtggtggtggctgcagtgagggtgctgctggtggtcgtggggatactagccacagaggggatggcagtggtggtgcaggggatggtgctaatgtggacgtggcgtagaatgaaacatcctggatttgctggcagaggacttgaatttgataagttgcctgggcaggggctgtggcctgtgagtgtgctgcaggggtccttgtgtcagcctgcctgtgtctctgtgggtgtgcctgtgtgtttgtgggctgtggatggcaaaccctttcctggctccacctccgacctctacttccccaatcaaaaaataaaggggtctgcatgctgacagcaagggggtgaaaaaattaaatgggtggggtgatggggtttcatgcctggagtttgggcctccagagtgcctgcagaaacctggccagccctcctccacagacacatcaaagaggaggagctgagcatgctcgctctgatgcccagggctctccctgacctcccaagggcaggtcagatccagctccagccggggggctcctgtctggggaaaggggtggggtctggggctgagacagagcctggccaggacatccccatggggcccacagatctgtgcctccccatgtgtgtgcccacatgtgagctcactgtgcctttgggcctctgcatctgtgtatccgtgtgtgtgtgtgaccacgttagtgatctttgtgtctgagggtctctgtatcactgaccagaaccagcattgacccaggcttgccctgggtggagccccatggcaggcacttacatgcattgcctgtgtaatcttcttacaatcctatgggacaggtactgccatccccattttacagagatggggactgaggcttggagaggttaagttatcagctgagagttacccagcttgtaggtggaggagtgggactggaacccaggctagctctctcgtggggctgggagtggggggtggaggaggggtcaggaaatgttttttggcctttctcttctgggcaaatcaggctcctgttctgctggtctgggtggagatgctggagtgtcaccaataggatacagtggggaaggatgttgctcctcttgctgtcaggctgggcttggggcaaatggagcccccaggctggtagcctccggaagacccttgcagaggctccccagggaacactataggtggatggcaggatgagggaggtccagtgatggaggcgacctaccctgcacgtctcctgcagtgtttgcgtgcatggccaacagcaggtgtgagctgatgccagagctggggtgggcttggggtggtccaggaaaccaggaggagtggtttcagggggccacctggaattctgtcttgtatattgcacacagctccctgtttgtagataatgtgcctttctagtagtgcccatactgcgtgctctaaccacatatacacattctgcaaattctaagcgcagtgttattttaaaatacttgaggctgggcacagtggcttaaacctgtaatcccagcacttttgggaggccaaggtgggaggatcacttgaacccaggagtttgaggctgtggtgagccatgatcacaatactgcattccagtctggatgacagagcaagaccttgtctctaaataaataataataataataataataataataatagtttgattagattctcaatcaatcattatcataagaattttggttgcagggtgggcactgtggctcacagctgtaatcccaacactttgggaggccacggagggaggattgcttgagcccaggagtttaagaccagcctgggcaacatagagagacccagtctctatgcctgaaaaaaaaatgtgttacagttgtcagtgagagtgaagagtgagggttaattcttttttttgagacagggtctcactctgtcacccagcctgctgtgcagtggcatgatctcagctcactataacctctacctccaagccatcctcccacttcaggctcctgagcagctgggactataggtgtgcatcaccatgcccggctaatttttgtattttttccttgtctcaaaaaaaaaattatcacctacttggggtaagtttttttgtgggtggtgtttatccaacatttgaagaaatcatcattaaagagccttcatgagggcgggtgcggtggctcacacccataatcccagcactttgggaggctgaggtgggcagagcacaaggtcaggagatcaagaaaccctgtctgtactaaaaatacaaaaacttagccgggcgtggtggcgcacgcttgtagtcctagctactcgagagtctgaggcaggagtatcgcttgaacccaggagacagaggttgcagtgagccgagatcgcgccattgcactccagcctgggtgacagagtgagactcctatatctcaaaaaaaaaaaaaaaaaaaaaaaagacctgatgagctgggagtggtgtggctcatgcctgaaatcctagcacactgggacaccgagatgggcggatcacttgagatcaggagttccagaccagcctggccaacatggtgaaacctcgtctctactaaaaatacaaaaatggctgggtgtggtggctcacacctataatcccaacactttgggaggccgaggcgggaggatcacctgaggtcaggagttcgagaccagcctggccaacatggtgaaaccccatctctactaaaaatacaaaaattagctgggtgtggtggcgggcacctgtaatcccagctactcaggaggctgaggcaggagaatcacttgaacccaggagatggaggttgcagtgagccaagatcatgccactgcactccagtgtgggtgacagagcgagactctgtctcagaaatataaataaataaataaaataaagagcctcgaataggaattgcctgtggtcatttcatgcaaaaaaacacctcatattaaaaagtgctcacgaaagcaagctcatttctcattttgagaagtttaggaggtttcatttggatgttttacacaagtctttcctaatactttatatttcattttttcctatcataattatataagataaagaaatagtaatctttttgtttttttcaccaggcatcccatggatgtctcctagttccctcactgtggcccagtgttgtatatcaacgtcatcatggatacacctcctgtgggaggtgattaggccatgagggtggagccctcgtgaatggaattggtgcccttatagaagggaccctggaccctggacctccactctgcaaggatacagtgagaaggcagaacccagcctcaggtacactcatctcagacttgcagcctcctgaactgtgagaaataaatgtttgttgtctgtggtatgttttgttactgtggcccaagctgttggacacagggacacccctgggctcccaggcaccacccttccctcacgctgctgctctcctggaacacggtcgtgcctcactgcccatccaaagccacatcccggctccacctgctcactccttgtttcttccactcgatggtcaaatttttctcttaccaagaagctggccaggtgcagtggctcacacctgtaatcccagcactttgggaggctgaaacaggcagatcatttgaggtcaggagttcgagaccagcctgaccaacatggtgaaaccccgtctctactaaagatacaaaaaaaaaaaaaaaattagccaggtgtggtggtgtgtacctgtaattccagctactcgggaggctgaggcaggagaatcgcttgaacccaggaagcggaggttgcagtgagctgagatcatgccactgcctgggcgacagagcaagactccctctcaaaaaaaaaaaaaaaaaaaaaaaaagccatgtcacagagctaagagcaacccaaccagtgatctgggttcaagtctcagtctggccacacactagccagggaccttgggcaagtcatctaacctctgggtgctgcagcgttctcatccgtgaaatggggagaatgatagcgcctgcctcccaggtggttgtgaagattcaatcagctgtgcaggtcaagagtttcgcagtgcgccaggcacacaaggagtggtcgtgaaccatctttacaacattgtaataataatagtgatcatctctgcacctgagcttcagtagtgcattttcaaaatctgtattagttttctattaactgctgtaacaaatgtccacaaatacagtggcttaaaacaacatgaatttttttttcttgtagttctaaggtcaggagcctgtaatggatcttggctgactaacatcaagtggctggcaggctgttccttctggacgctctagaagagaatccatttcctcgtattctctactgtgtagaggacacccacattccctggcttgtgacatcgcattcctccaacctctgcttccctcatcacagctccttctctgactctcaccctcctcctacctctctctctctctctctctttttttttttttgagatggagtcactctgtcacccaggctggagtgcagtgatgtgatctcagctcactgcaacctccgactcctgggatcaagtgattctcctgcctcagcctccctagtagctgggactacaggcgtgcatcaccatgcctggctaattttgtatttttagtagagacgggttttcaccatgttggccaggcttgtctcgaacccctgacctcaggtgatcctcccctctcagcctcacaaagggctaggattacaggagtgagccaccgtgccgggccctacctctctcttataaggacatgcaggacccacctggctaatccaggatcatttcctcatctcaaaatccataatttaatcacatctgcaaagccctttttgccatggaaggtaacatattcacaggttctagacattaggaggtggactcttgggggcccatggttctgtttaacttcagtaggggtctttggtggtgcatttatcagtgcttagtcttctccatctcttccctataactcccaggtcacgactaaataaataaaaagcaggatgtcacacacattttggagcatggtggcaaactcagccatggtcaccactgtgggatgtacactcgcctcctgcttcctggccttggggctgttgtccaagcacccagagggcacagctggtgagtgccctctggtttggaggagttaggggtgtcatgaaaagcagcatgcaaaggaggctcctgtggacagtgggtgccgtacttttaggaaaatgcccaatttgcgtaggagagtgtgagtgtggggtgcgtccagagattggggcagtggaggaggcaggagccaacagcaaatgtggctgccaaggcatctcaggtgctggtaggctgggttatcagaggtatgaagtctctacctgagaaagataaaatgctacgttctccttcatcagccaaaccctatgggggtgtatgctgtggcaaaatggtagcactcaccaagtcattcacgtgttcccttataattctcagcctctgtgccagggaggctggggccttgtgcctgagttctggtgcagaatctaccctcatcctttaccatcttcccattcttctctgagggtggccatggacaccaggtgtaacagacctctgtgccccgcccactcccctcagacctcaccactaccttctttctttttttttttttttgatatggagtctcactctgtcgctaaggctggagtgcagtggtgtgatctcagctcactgcaacctcggcttcctgggttcaagtgattctcttgtctcagcctttcaagtatctgggacaacaggtgcccgccaccacgcctggctaatttttgtatttttagtagagatggggtttcaccatgttggccaggttggtctcaaactcttgacctcaagggatccaaccgcctcggcctcccaaagtgctggaattacagtcttgagccatcacacccagcctttcaccactatcttctaaaggttgctcactaaaaacagcccagactgtctgcctgagggctttttttttctggcactgggtttacatttggcccaaggaaacctggaggtgcccagctagtgccctagccagtgacagccagagattggtgaagacatgccacctcctcgttcctggggagcggttactcgtgttgtgctctccccgagctccccggtcggatcatgctctggttgcccacggtagtaactggctggcggctctacccttggttggctttcttccctctccagtatcacttctgttccttgcagggttccccggaagcaacattcttataagctatgtgcactcatttccttttctcaggacctgcttctgggaaatactgtgggtcttttaaatttttatttgtttatttagagacaggttcttgctccatctcccagactggagtgcagtggcacaatcacagctcactgtaaccttgaactcgtggactcaaaagatcattaagtctcaacctccaaagtagctaggactacaggtgtgcaccaccacgcccagctagggtttttttttttttttgtaatttttgtagagatagggtcttgctatgttgcccaggctggtctcaactcctggcctcaatggatcctcccttgcctcggccccccaaagtgctggggttataggcgtgagccactgtacccagccatatcatgtgtcttgatggtggcatcacaagatggcagtgtcagctgggtccccaagcgactgtgtggggcagatcccccttcttcaacctcccttccctgtttaactacatcaggttttgcttgagtgagaaatacatctttattgtgttaagctactgacacttttgttttatttttactgtattttattatttatttatttatttttgagatggagtttcactctcttgcccaggctggaatgcagtggcatgatcacggctcactgcaacctccactccccaggttcaagtgattcatcctgcctcagccacccaggtagctgggactataggcatgtaccaccacccccagctaatttttatatttttagtagagacggggtttcaccatgttgcccaggctggtttcaaactcatgacctcaggtgacccgcctgcctcagcctcccaaaatgctgggattacaggcgtgagccaccgcgcccagcctagtgtattttattttacattcccagcctagcctaatacaatgtttatgtgtgagattttaagcaagacacccagagtccattctaactctgaaatacctctaatctatcgattctctccatctccaccctaatccaagccccatcagttcttgcctgccttctgcaattcacatgggcccctttcaagacactcccaggctgtggccaggggaatcttttaaaagtgaacatctgactaaattactacttaattccctccaacggtttaagtccaaaatccttaacagggcctgtaggaccatgtgagagctggtaccagggcaactctcctcccgatgcctcctccccagctgaccagtttgctttcagtttctcaaacaggacaagccccttcccatctcaggcctttgcacaagttctgcacattccagcaatacttctccccctattctcaccagagaaattcctgtgaatccttaaggtctcagtgtaatgattgtgttggggctcagagaaacaataccctgaaatgaaggtctcagaagcaaaggactctttctgaccctcacctgtgcccctgtctctcgcccctcattctcctccaaggttagccatagaaactagactccctcttccccagggtgggtcatagaaaccagaacccctttctccctgaagccagccataaaaccatacaacctaaaaatattactctaggcccagcgggtagtggttcacgcctgtaatcccagcactttgggagaccgaggcgggtggatcacctgaggtcaggagttcaagaccagcctggccaacatggcgaaaccccgtctctactaaaacatacaaaaattagccgggcgtggtggcaggcacctgtaatcccagctactcgagaggttgaggtaggagaatcgcttgaacctgggaggcggaagttgcagtgagctgagatcacaccactgcagtacagcctgagtgacagagagactctgtctcaagaaaaaaaaaaaaaattactctaatctccacccccaacatttctgtgtgaaaactggccataaagaaatgatttgacctgccttgttaggttgcaggtcacaagatccccttcctcctgtcccatgggagaaagaagtgctgcccagagaggcccgggagaaccttaacggaagccttgctgggttttccccccaagtctgtgacatcagctcagatcttttttgtccaatcgtatttctgcgtggttgtttccatactctgttgaacctaagcataaaaatggaccatttcctctgtgtctttgggtcttcatcctaaaaactctggcatcaaattaatatgtatgcttttctcctgttgatctgctttttgtcagtgattttcagtgaactttcattgggtgaaggggacgttttccctcccctacagttccttctttagagaggccttcctgaaccttctgctgagaccagtcctgcaggatacaggctttcagagccccctggatgtacttccccttccagcactgaatacaattgtaattactttttgaggtgggtgggttatttaatatctaggggctcccattgtaccataaaggctaaaagtcctcatctgttttattcactaccatatgcccaatgcttagcacagtgtgcctagtacataaaggatgctcagttaataagtgtgaatgaaggaatacatgaacaagtgaatgaagaaaagaagtgaatcttggaccaagataaatttgtagggaggcaagaattcagacacaaaagggagacagcactcacctgtacagttccgcgaggagataagacagtacacttctgagacggcacaactctgtgagatgagtgcggggtgaaatgcctgtacgaagctcactgccatggcagctgccaccagatcacctccgactggcctcctctagaccctcagggacctctccccatcccacatgcctcagcctcccccatcacagccagtcagcacaggcagggagaagtcatttcatgtggctgcaaagggctgggcagagctgagccccaaacagagaactccctcattttcttcttcttttttatttttatttttttgagacagagttttgcttttgttgcccaggctggagtgcaatggtgtgatcttgcctcactgcaacctctgcctcctgggtttaaacgattctcctgcatcagcctcccaagtagctggaattacaggtgtgcgccaccatacctggctaattttgtatttttagtagagacagcattttactatatgttggccaggctggtcccgatcacctgacctcaggtgatccacccacttcggcctcccaaaatgctgggattatagacgtgagccaccgcatccagtcatcttttttttttaggatggggttttgccatcttgcccaggttggtcttgaactctgggctccagtgatctgcctgccttggcctcccaacatgctgggattacaggcatgagtcaccatgcctggctggactccctcattttcaatgagagccttggaaatgggagcatgttagtgtggacacgatttctctgctcccattgtagtctttgggtcccagtgcccttccccgtatggggatgctgaaggtctctcttgtatcatcgtcacaaattggggcaggtgcccagggatttatacgaatcatatagaaacctacccatctgcttggccaggactacctccctgggtgagcagtcccctcccctgggaagttggcaataaccggtgactttccctctgtccttcccctgctcggttgctcagaagcaccactagatttgttggtcctccttcccccgtctagggattctctcctccctggcctgcctctggactctgcctctgtgactaaccctttctctcccttgttgcctcctcttcccactccagaactttaaaagtcttagtccttcctcatctcacagaagcccctcctctcgatggccctatccatttctgcagcttcagcatcctctccacatgtgtgaaccccaaatatcatcactcttcctgaccttgccaccaagcacttgtctctcattcccaattgccagcaggataaaatcaaagtcctgagctaaatcctcaagtctcctgccatcttcccctcctcttgcaaacctagctgagatggggaccacagctgcccaggcagcatgagggtggggactggaacagccaatgcccatgcctccagtacattcctgccttgtctggcttgccactgtgtctcccgaagaaggtccacatacaggacacggtgaggggtttgaaaccacactggggacagaagaggatgaaagatacatttgaaagctgtcaaggacagaagatcaagagaatgtattcccaggtaccgagctcagggaacatggtttgatgggactcctgggccctctggccaaggtcttttgcttttgccaggctggactgcatgcctctccacttggctctttgttcacttgttttatctctctatccacttccagactcgaagctccattaagacagaactatctgtcttgctctctggccactctaggcattcagtgagtatctgctgaataaataaatagaacatgctttgccccttgcccaactttatgcctttgttcctttttctttttttttttttgagacggagtcttgctctgtcaccaggctgttgcagtggcgtgatcttgcctcactgcaacctccgccttcagggttcaagcgattctcctgcctcagcctcccgagtggctgggattacagacgtgctccaccacacccagctaagctttgtatttttagtagagacggggtttcaccatgttggccaggatggtcttgatctcttgacctcgtgatccgcccgcttcagcctcacaaagtgctgggattacaggcgtgagccactgcgcccagcctatgcctttgttcttatttcttcccttgagatgctctgcaccctccctccatctttctttccacatgtccaaatctttcccatccttaagacccattcaaatggcaccttcattgtgaagccttccctcaccctcaacccccgccccactgagagcctccttctccctgctaactccccatggcacctggtttgcctttattagatcacttacaccttatgctttggattctcataatttctgtactcacctctgtccccctaataaagtgccaagatgtagactttgctctcctctaggcctctgccccttgctgatgactcccctctctaccccatccctgccccgcagacgtcctgctatggcctccatcagcacagatgttggccacagacagcatacccgggttcgccccatgcttttctacttcctcagcacaaggaagcacagctccttgagggcaggggcaggtcatcagtgtattctctcttccctattccctggcacagtgctttctatgcagtaggtgctctataagtgctcagtataggaagataagagtattgattgcagtcggcgactttttactccagatgctgcttccctggagcccaaagcagcctccctgagcctcctttccccaggctgggacctcactcatgcagactgggccgccgccaaggtctccctccttcctccacaccctatcactgctaaagctttgcctaaaccaggtcccaacccagcactatttccgacatttgcatggcctgaccgcagccagtaggtcgggggaggctgagctgcagggattttcgggtctcacaaggtctcttgtcaagagcccaggagcacaaaagttgcctgatgaagggggcaggctccagggtggggggcatccaggggcccctgtacttcctggggtgctgaggaagtagaaaagcatggggtgaacccaggtctgcttcctgtggccaccatctgtgctgatggaggcgaccacagggtgttgggggtgggggtagggagtgggggctggatgagtcatcagggaggggcagaggcccagaggagagcaaaggctaaatcttccccaaacccttcctgttcgggctgccagagatggagtggcagttttgtttttttgttttttgacacagagtttcgcccttgttgcccaggctggagtgcagtggcgcgatcttggctcactgcaacttctgcctcccaggttcaacctattctcctgcttcagtctcctgcgtagctgggattacaggtgcccaccaccacacccggctaatttttatatttttagtagagacgggattttaccatattggccaggctgatctcaaactcctgacctcaggtgatctacccgcctcggcctcccaaagtgtaggattacaggcatgagccactgaacccggcctggagtggcagtttttccagcagaactaacaccggcatttcaagggtttttatccctgagctagaacccacactcctactttgctctgaggaaatcttcaccagggtgctaacctcttgctaagggcagcagtagatacccctgggaatgtctaggggagggggtcatcttaggaagggaccttgctgagcccagggctcaggctagcggtggggcaggtggtgcatggaaggtgagggaggagcacctgcccccgctgcaggagagcagaaggctgagaggaactgaatcttgaaggaggaggacccaggcagggctgtttggccttggttggccagaattggtggggcctgggaaggtaggagctgggagagtcagccccttgacattcaaacacagaaatatcccctcaacaggaaaatataaaagtagtcatctgtagtagccagcaagaggcactaactagtggtttcaagaggaactcaactagcagagcttgctagaacttgctatgagaaacttggtataagctgctagaaaccccagagaattaaagacacaagcccgggcatggtggctcacgcttgtgtatcccagcactttgggaggccgaggcgggtggatcacctgaggtcaggagttcgagaccagcctgaccaacatggtgaaaccctgtctctactaaaaatacaaaaattagccgggtgcgcatgcctgtagtcctagctactcgggagactgaggcaggagaatcgcttgaaccgaggaagcagaggttgcagtgagccgagatcgcgccattgcactccagcctgggcgacagagcaaaactttgtttcaaaaataaaagacaattacacaaatgaaactatcgaggcagcagactaaggtcattattattatttagaattgacatctagaacccagaacccatggcagatttacttagattcttgctactcaaagtttggttcactgaccaaaagcacatcagcctccaggagcttgtttaaaatgcagaatctcagactcggtcctggctacactgtctgaacctgtatttaacaaggccctcggtgaaccgagtccacattaaagtttgtgaagcgcgctggaggccacacccagaaactaggcagagattgggctactttaaaaaggaggctaacaagacttagggtgcctgccgtggggtccccacggcctggaaagactccagaactttgtcagcgcggcatttcacctgcgaacactgccgcttcaagcctggccaggaccctacacgtcggtgtgttgtgacagcctcgtgcccagtgccaaggtaggggcgcggtggctaaggccacccccgcagagcccgggggatgcagccaggtccagcggcggcttgctggagtaccacgtgcttaggaggcggtccacctgctcccggctggagattgcgcgcaggtgggccttcccacttccactatccaggccttctgggggctcaggcactgcggggagctcgagtctcctgcctgcattgccccggcgcagcccccgcgcctgcagctcactccgcatgctggcaaagaagtgcagcacgcagcggtgcgcgaagtcccgcgcatgctcacagcaggtctcgtcgaagagcttctgctccaggtccacgtagttgctccagtatctgcgctgcaggaagactgtctggtcgaagcagggcctcaggcagcgggccaggaaggccgcgatgatcagcagcagggtgacgctccagccgatggcctgcaaagtaaggaggcccgaggttagatgtgagtggggcctaatcctatatacatatgtatttatgaatacgtatatgaatgttgcatatttaatttgatcatgtctacataataatattcttcattttccaatggattcaaatactccttagagaatttaactgcagtataccactccaaacatcataattcattaatcagagtattgaatgaaatgggaccaaataaaataaattgagaagaatgaacgcaaagaaaattgtgtgatcatcagattacatgtcctcttttgtatccctgtgtccttgtaaatttaattaactcttagagcatctgctacttgaggaattgtcctgtatagtgtggcaaaggtattccaaagtccctccttttacatttcccatccatccttcctcaaatctatccactttcctattcagtcatccgtcctgccaaccatccttcatccattcatctatcctcccttccattcattctctcatccttgcatctatccacccattcaatcatctctccacctatccaatcgtccatcctcttgtcttactgtaaattcgtcatcttcccatccagtcaagctcctaactatccttccatctgccatcatctatccatctcttctcccattcattcatgctctcatatgctcctccttccttcccttgatctatctactcatccaccccccccatccaaccatctatcatccatcctctcatctttttatttatttatttatattttttgagatggagtcttgctctgttgcccaggctggagtgcaatggcgtgattcagctcactggaacctccccctcctgggttcaagccattctcctgcctcagcctcccgagtagctgggattacagatgtgcaccaccatgcccaacaaatttttgtatttttagtagagacgaggtttcaccatgttgaccaggctgttctcaaactcctgacctcatgtgatccacccgcctcggcctcccaaagtgctgggattacaggtgtgagccaccacgcccggcccccctcatctttttatccagtcctttgtcatccttgtgtgtgcttatctgtctatcttcccatttaggcatccactgtgctatattttgtgggaggcactgtgctaagaactaggggctcagtcgttgctctcacagagctcataccttagtgaaggaaatagatgattaaataggtgatgactgggtacttgtcatagagagggagtccagaggagggacacccatcctgactttgagggccaagactgaaggctgaacgacagtgacacacaatatgaacaggggacagtgttcccagccaggaatgaggacaaactgaagtagttctctaaagctggggcccacacctggcagactcctctccctcctctctaccttccaaagccatagtctctttaaggcccagcttgagacctgatgcaattgtgtggacctggagcagggaagtcacgtctctaaaccacagggacatatttgaatccttatcatttacagaagtgatttccacgatttataaagctctctcatttggcatctcacaggactcccccaacatcaccagatttaaggtgagtattttatacacgagagtagaaaaccaaacaacttactaaactttacatgactgataatttacagctgagtcaggattcaaaccccggtctcactgcaaattccatgctctttccaccgaactagggaaagcctagagttttgaagcttgcagggaccatcaagatggaggagaccaagctcccctgtattttgcatgataaactgaggtccagaggggtagtcccatggccacggtcacagtctgagccagaatcaagtgcatcctgcacctgggtcctccctccaccgcaccattggccagcccatgagcctgtcagacttcccaaggggcaggggctgtgtgtttattatctatagccctagtggtgctccgtgtgtagtgggttcacataaatactttttggtggacacaactcagtgctggggctgtaggagcagtggtggtggaatctggagtctaggctgggggtagagctggggtttgtcccccaagataatagagttggtgccttttgggaagatcagcatctggagagagcctgcattgttggaaggtggttaagaggaataatgacactccttccgatccctgctctgcctcttataagctttgtgactttggccttatgaactaaactctcagagcctgcttcctcacctggagaatgggatgataatggttgttccacaaagtaaatgaaataatacatataaaatgctcactgcagtgcctggcacataaatgctcaataagtggagattagtattatttctcacgggtgggaagaaggtgtgcagtgggcgcaggcaaggcagagcagtggtctccagcacttccctgcctcctgggaatgggctgagcccatcatctgtccctcctcaccaccccctcaccccactccagaaccaatgcgggggatttgtgagggtgcaagggccgggggaggatcaccccagttacctgtgacaggcaccgcaggtagcgagacactgccttccgagcagggctatccctgaccagctcatcctccttgcagggaaccttggccaggaagagctgtacctggctgggggtcatgttggcaaagtccagaaacttctcagggtccacagagctgctgaaggcacacacgaagcacttcccgtcaaggagggccagcaggatccagaccaggggggcggccagcgccctctgcagcacagaggagcacatgtacctggcagcagaggaaggaggggggtcaaggggcagctggaagtcagctgcagcaggggaggtgcaaggatggactgctgggaagtcccaggctgggttacatcagactgcagctcccagtgtagaggtcccagtgacagagacaggcagaaaggagggcaggggcccctgggatccccaggactggagcactgaggacttggtattcctcttgccctaggccttacagcagacactgctggtgccctgcccatgccagaggcatctgtgggtgcagtggctggttctattcacctggagggcctgagggcctcctacctcaagcatctgcattgttctgcccctggggctttggaggattttttgctccagagaggggtaggctggaagcactgaaaagttaacccccaaatcaaccttcaaccccagagggatggggccttgtggataaatatcccagcttcttaaatcctcagtgggaaaattctgagatgtgttctatgcatgcccttagggggtcccctgaaggattaagccccagttgcccactcattatcacattctttcagagcctgcttttggaggagagcctaagctaagacagccctgcccagtaaccctccaaaagcagcacctctaacacccctacccacaaggcatcccaggagcccaccctctgaccggcctcaggcgcctttccagatcaactctgcccctgcctgtagtgacctcgactgggtattggccacaggacaggagcccagtggagctgtgcccactggaccccagaggaaaaggccaaggacacacccagtgcctgtgacccaccctgcacagctgaattgcagggagatgtgatccctgagaacatggaacagaggctgagggtgcaccggatgcagatgttgtttctgaattggattgtacacaaaacatccaatggtgtgtgccaggtgtgtgcgtgcatggcctacccagtgtgagctgtaaatatgttctaggcagtggtggctttagcattttcttttctttttttgtcttttttgagtcttgctctgtcgcacaggctggagtgcagtggcacgatttcagctcactgcaacctctgcctcccaggttcaagcgattctccttcctcagcctcctgagtagctgggaccacaggtgcccaacaccacgcccagctaattttttatattttttagtagagatgggggttttgccatgttggccagagtggtctcgaactcctgacctcaggtgatccactcgcctcgacctcccaaagtgctgggattacgggtgagagccaccgcgcctggcccccccacccaatctctggctccttattttcccccaaggctagccatagaaactagaatccatcttccccaaggtgggtcatagaaaccagaactccttttctccaaagctgccaccataaaacctaaaaatatgattctaatttccccccgcctttctgtctgaaaactggccgtaaagaaatgatctgacctacctagtttcattgtagatcataagactcccttctagagagggtcctgccccgtgtctgggagaaaggaacactgtatagagaggccaagaagaacctagatggccttgctgagtttccccactccgtctataacatcagttcatcccttttttaatccaattctatttctgcgtggctatccaaaccttgttgaacctaagcataaaaatgaaccatttcctctgtatctttaggtctttattctgaaggttctgtggcacataaaacggtaatcaaataaatttgtatgccttttctcttattaatctgccttttgtcagttgattttcagcagagcttcagagggcaaagaggaagttttcccgcagcccctagagtggcctgggtaattgggaatcctgtgtcattcctatgtttacagcactggccacggaaaggtgacaaacgataggaacagaaatatgtttccagagtggaaactggcaagtggctctctgtgagccgataattcctagttggggaaaggagagggcgcacctggcagtacctgtagggtgggtggagaatcccctgataatgagaatggttggggtctgggggtgcacttgacagtgcctgtggggtggctggggagcccctggcaaagctcatgggtcactgagtggtgtgggaccgcacctgatgatgcctgggtccttcctccggtgccctgcgggccggcgccactcctcgaccatcaccacagactgccggttggcgaggaggccgcagagaaacagggcgagcgggggcgtcagcagcaggcccaggccgtagagtgcattgtagtgcaccaggcagggacagttgaagtcaaaggaggagtacagcttgacggtgaccgcagccagcagcaggcagatgccattcatcaccgactccgagcttgactggaagtgctggaagagcatgcggaatttatccatggctccagcctgggtgggtgggcggccgtcggttcggctcagtgaggctctggccaccttcctggtgtctgctgtgctggggacgagcctgggatctgcaagaggttctctctctgcttccaagggcctgaggggccaaggaggaagcagtgcccaggccccagcccaggctcccgggatccagtaggcacttaaggcagggacaggctctcaccacaaaggctcccctgcccagcccaatggtcccctggtgccactcccctcctgtctgggggagtgagtcaccctctgtgaccgggcagcccaaagcacctctaggcaaatgggccccgccctgtcactccattcctcccggcccatttctctttgctttacggtctggatgctcaggcttgacagccgttggagcttccttcgggggacaggcaaattctgggtgtggtgaggaaaagatgctgatggagccaaggtagtatattttctggtcttgatcaaaagcatgactctgaacttgtctcacaggcatagtaaaacaacagcaacaacaacaacaaaatatgacgactcagctcagcccagggagatttcatgttggctttcaggctaggaggagccagaaggggcacctattcctgaccgaaggcttcctggaagaggagacccttgagaggagtcttcaacgatgtttcagcatttgccatgaaaggggtagcggaaggggatggcctccctgggcgacgtgctaaacattgtgcattaaccactgggtgcccatgggagaggctgctcaagtgccacgcccacacctgcatggctttccccctgcccttcttccgtgtgaggggcatgcgtttgaaatcactgcttcttctcctaactctcccacatcactaggtctctccttgtgtctcagttccagtctctccgaaggatgacagcccagatgtttgagggacccctgaaacctgcaaaacgaattttgtaaaggtcacttggcccatattgtaagtcagatcatcccaaataagtcttgcaaatttcgtaaccatctgtgtggtctgtacttctgatgaagacagacagaaacctgggtcttacttattattattattattatgagatagagtcttgttctgtcacccaggctggagtgcagtggcacgatcttggttcactgcagcctctgcctcccgggttcaagtgattctcctgcctcagcttccaagtagctgggattacaggcacccaccaccacgcccagctaatttttgtatttttagtagagacaggggttttgccatgttggtcaggccggtctcgaactcctgacctcaggtgatttggcccccttggccttccaaagtgctgggattacaggcatgagccactgagcctggccacttagtatttttattttccatatttgtacgttactctaggtcctatgagacagatttccctgtgtgagggaaatgaggcactggagaagatggggagagccaccagtggccctgtgagtctgactctgagcggaggagagggcggggcaggggtgagaaacccttcaagccaggaggaccaccacaacttcaggtgggtacagtcccagaggggctgttggaggtcacataccctggcggggacagagccagggaggaagctgggatcctccatctgtgcctttcagccttagtcacccactgggctgctgaccagaaaaggggactgtcctggcccaaggccaggcttcgtgaccctgaaccagcagggctggtgtggagcaggcggggagctaactgggctgggagggtcatgagcacccctcaatcccattctagtctcagggagggatagagtgtcctaagggtccccagccactctaaccttgagagttcagaaaacaatagacaatgcttctggaagaacactttgaagaaaactgggtcaaagactccaggccaaccttttcacagctccagcctctgagaggtaagacagagctaccaggtcagcctgggtccctggagccctgcagggcaacaggtgctgagtgactgcagcggggctgacccttgccgggtatttacaggaaatacttcagtaaagaaacaggccagaaagaagcccaccacaaaagggatattatctgtcaaagagaggggatggcttacatttttttttaaatctctattttctgaattgtcgacttttataatagtagacataataaatcattactataatcataataatgatttttaactatttccagcaaaaatcataaaacattttaattagaaaaacataaaaagataaaaggacaaggcaaaaaggagaattccattttgttgcctggagcttggccctgctgaactagtagagagagaactagaggcagcaataaatggagaaaggcttcttttactcacacatatggaaagatattaaattgcagatctggccgggcgtggtggctcacgcctgtaatcccagcactttgggaggccgaggcaggcagattgcctgagctcaggagtttgagaccagcctggccaacatggcaaaaccccatctctattaaaaatacaaaaaattagtcgggcatagtggtgcatgcctgtaatcccagctacttgggaggctgaggcttgagaattgcctctcttgaggctgaggcatgagaattgcttgaacccaggaggcggaggctgcagtgagcccagatcatgccactgctctccagcctgggcaacaaagagagactaaaaataaattacatttttctttttaataatgatttaatcttttttttttttttaaaaccagttgtaaatatgtgttaatttgcaattggaagatctttatagaataaatctttggtactttcttcatgttattttgttttattttcaaattggagtcttgcagatatattcttgggggtcttccagttttttttgatctttgcaaaggagtctggatattatttgagaaacactggcttcaccgttcttggagttcctgttattgagagggctgtttaggactagatgccccctactggagaaactcgttgtatgtgatgtgtgagagatgtgtctatgtacctgtgtatgcatgtgtgtacacatgtatgtgtatgtgcgtagtgcatgtgtacatatttggtgtgtgtatgcatgtgtgttttcatacatatgggtgtggccgtcttcctactttgtatatggtgagtatgccctcccctgacagttctttcttttctttttccttcacagggaaggcattgaacgtgcgtcccacttctcaggactgggagactgttgttctgtgtgtctagcagagggtggtgccctttctgtctctcggtggcgtgattctctgcttccctgaggacacaggcctttgagcggtcctggcagacccggggaaagcaacgtggcacttctgtgggccccactctggtgactccacagagccgtgtagccctaagggcagagacaggctggaaatgaaatggggccatctaacagatggcgctggaacaactggctagccattcgggagcaatctctacttcatgcttcataccaaaataattttcacatggttcaaagattcaacataaaaattaaaatcataaaaattctacaggaaaacgtaagggaatttattcataatcagaggctaaggaaggcctttgtgaacagaccccagaatttagtagctgtagaggagtagatggacaagtaagagtcataaaaactagacgcttctatgggcaaacataccaataaacaaaataaaaataacaaactgaaggaagggtatttgccacacaaaggcctctttttcttaatttgcagaaggctcatataaatcaatccaaaagacgaacaatcctctagaaaaatgggtaaaggatttgaacaggttatttgcaaaaaaaaaaaaaaaaaaaaaaaaagagagagagagagaaaagtgaccaaacatcctgaaaaaattctaatcctcattcataattaaataagaaatgaaaccaccagttgcctttaaaaattgccaagttgttagcaactgaaagattgatacttcccagtgttgatgaggcttaaggaaatagctacttttcatctatggttggagtacaaatgggtaggtttttcatggaacagtttagcaatacatttaaagcaaaaatttaaatacacatgccctttgacttagtaattacaaagtctgtattcatcccatgggtagctttgcagaaggagccatgataaacaaacaagaatgttcattatagctcttttaatgacaatcaaactggaagcaatctaaatttcatcaacaggggactgtttaaataaaatatgacacagccataaaatgggatccatgcagtcattaaaagaatgaagcaggccagatgtggtggctcatgcctgtaatcccagcgttttaggatgccaaggcgggcggatcacctgaggtcgggagttcgagaccaacctagccaacatggtgaaaccctgtctctactaaaaatacaaaaaaattggctgggcgcggtggctcacgcctgtaatcccagcactttgggaggccaaggcgggtggatcacgaggtcaggagatcgagaccatcctggctaacatggtgaaaccctgtctctgctaaacaatacaaaaaattagctgggtgtggtggcgggcgcctgtagtcccagctactcgggaggctgaggcaggagaatgacgtgaacccaggaggcggagcttgcagtgagccgagatcgcgccagtgcactccagcctcggcgacagagcgagactccgtctcaaaaaaaaaaaaaaaaaaaaaaattagctgggcatggtggtgtgtgcctataatcccagctactcaggaggctgagacaagagaatcacttgaacccgggaggcggaggttgcagtgagcggagatcccaccactgcactccagcctgggtgcaacagagcgagactccatctcaaatagtaataataataatattaaagtattattattgacataaaacaaaataatcaggtttaaatcttaacattgtttctgactgaggaacagaacatggaactgtttccctggttgataatactttttttctttttgaaacagggtctcactctgttgcccaggctggatgcagtggcacgatcatggctcactgcagcctcagcctcctgggttcaagtgattctccttcctcggcctcccaaagtgttggaattgcaggcatgagccacggtgcccgaccataatatatttttaactcctgtttttctaagaagagataaataagcctgaattttagaatattattttctcttccctcttacatgactaagaaactataaaggtagattttctgcccaaacggaaatgacgtttccagaccctgaaaagcggggctggtgctctggctaggagatcctgcgaccatcgcatgtgacactacatgttgggccaaatgcagagacctgggggcaaagacaggcaggctgctttgggggaagagggcacctggatagagtttcagctctgggggtgatcgggtgcacagagggccaggctaggaagcacctctgttgttgactacacaccctcaagctctggccatgtagtgacagacgttccctgggcatctgcggagtgccaggggctgggcttacgcagatgcccatactgggtaactggacacagccagaggggcatcccggtgtgagtagcggtgctctggaggactgtgactcagctgaagtttggggagcctcggcctcagtcctgggagagagtctctgcagggagctttggccttctgtcctacggtcaccatgacagggagagctcctctgctgccggagaccccatctcaggatgaaaggtaaaacgtggcctcagtgaagggcacatactcagaggggaacatctcagtgattgaagagggggccagtttcctcaacggtatattttctttaccatgaagtagccaatggaaactagaagggtatatgttttcccagcaaaactcttttcattttgaaagaggaaaagagcaatccgtaaacatttatttatttatatatttttgttttgagacagggtctccctcgcctaggctggagtgcagtggcgtgatcactgctcgttgcagtctcaacctccccaggctcaggtgatcctcctacctcagcctcctgagtaggtgggtctacaggtgcacaccatcacacctggctaatttttgtttctttggtagaaatgagttctcactatgttgcccaggctggtcttgaactcttgggctcaagcgatccgcccacctcagcctcccaaagttctgagattacaggcatgagccaccgcacctggcctcataaactttttttttttttttagacggagtttcactcttgttgcccaggctggagtgcaatagcgcaatctcggctcactgcaacctctacctcctgggttcaagcgattttcttgcttcagcctcccgagtagctgggatgcaccacccagctactcagtggcatgcgccaccacgccccactaattttgtatttttagtagagacggcgtatctccatgttggtcaggctggtctcgaactcccaacctcaggtgatccacccgcctcggcctcccaaagtgctgggattacaggtgtgagctaccgcgcctggctctggtaaacatttttaaggtgttttgaatggcttgagggctccccaaaaacgtttgtcagagacaaaggggattccaatggagttgtagtgtcacctagtggtggctggagggaggaactggggtgagaggaagggagaggcgggacacacagcaggtctgctcttttggctatgagaaaaacttcccccagctatcgtccctgggaagagagctgcccttgggtgtgctctgggactgctctggggaagggtgcgtgaaagggagatgtcacactgccagcagcaattggagaaaagtctgctccctgtcctgggtctcacgctaaaggcatttggtgtgatttaaggctgctggcttcttggagagatgcctcctgactcctatttgtctttcaactttggccatgaaggagtgttacacttttatgtggtcatatttatcatacttttcttttatgattctctggtctttgtaacgttcttggaagggccatcctgccaagtaaaggccacttaaaacatctgtgagagaaaagaggatgctgggggtactgcagccatttcgagcatctttctttgattttattgtctttttactctgttttgtgttcatcagtagctgtgtgctccctggctaacttccagaaagctgagctgaagccaccaggcatcttaggtgtcctcaagcaggagggggctggttcaggagctcagtgaggaggcctcctttgccacaggtgtctccctcaggctagggacgtgaaggaattccaccctggtgcaggcacagtatcatgggaatcaggactcaggctgtcctagggctgtgcctccacgcctcccccatcagctcctaggcaagtgacttagcctcctgaagcctcgggatttttatttgtaaaataggaataataatagtaataataacaagaacaaaaatagtacctatctcacagggttgtttccagacttaaatgaactaatgcatctgaagtgcttagaccaaggcctgggacacatgagtaagtgcttcataaatgtcacctgtcacagttatctgagcaagtggccctgggatagatcaactgatgctggactttgaagtcagtacacaactgtctcagatggagacacactgtcctctttccgacattgggcattttcttttttttcctttttttttttgagatggggtcttgctgtgttgcccagtctggagtgcagtggtggggtctcagctcactgcaacctccacctccagggttcaagtgattctcttgcctcagcctcccaagtagctgggactacaggcatgagccaccatgcctggctaatttttcatatttttagtagagatggggtttcgccatgttggccaggctggtctcaaactcctgacctcaggtgatcggcccacctcggcctcccaaagtgctggaattacaggcgtgagtcactgtgaccggccaacactgggcattttcctttctgcttcatggaggaacctccttccgtcctttcagatacagtcttgggagtgcttggcctcaggtctggattttttccatgggtgctatgggtacttaagcctatgaacttttaaagcatctgcttgagaccagaaaaaaacattactgtcctcaagttatgaaaggaaaacttcaaaccaaaattaataaatgttcacttaaatgcctttgttgtatcaatgtcattgattgctaaatgtagtactcataaacatttcattatatttgaagacaaacatagtttttttctcacttggcaaggcatccagcacacgcatgattgcttagaaataaaaccagttgtaaattcagtgagtcccttgtcatccagtgattccaaaagccaaatttgtaaaaatcctttcaaaatgtttactgcaagaaaatgatgtttaatgtggaatgcggtatattttagtacatttggcctgacagggttgggctccaaaataagagtttgggggtctatgaagacctcacaactgatcctggattcaggggccacctcccagagggcaagtttgtctgtggggcagaggaaggggctgggattcacccctgctacctccttgcacagtcacctcttccaataagttagccctgcttgtgtggcagccagcactggcctggtccccatggggtgtccagctttcccccgagaaagcctgtaggccttctttaaacaccgtcttcacaactagaacatgtgaccatgtggagcagtttcccaatgtgtaatcaataaatgacctgtatcatactctgctcaatctaagtctcaaggggtgaggtctgggagtctgcattttagtaactttctccccctctccccaaggcctcatagatgattctgatgcacgtttaagtttgagaattattagtctagagtgtgtgtgcaccccaggaggagggcaagatgatccctttttcaatatcattagtctatgtttcataatatacataatatgaatacagtagtgcatttttagaaattataaataaagaaatatacatatattggtgtacacactttaaaaatttattactgctaggggtgcgtgatcaaaaaagtttggagctcagagcaacgtgcccagcccagctatgcggtcagacctgctgtatgttcagctctgaacctgggcctgggaggtggggaactgggactggagtgcacaaaaagcagaggacaggctgccccatggtgctagcaaggaaactgcatctcatcagcgccagggatacaggtagtgctcaataaatggtcactgggcaatgagtgaagctgaatcccaaaaatacctgggaataagatggcatagggcccattccatcctaaaatgggcagcacagacttccatccttcagagggagggcccgacagcttaatccatccatttctttattcattcatttatttaataactagttattgagtatgcactaggcatcaggcacaggcactcagagatctacccctccaacttgtccagccaccccctgaagttcagacaggacaccaccctctcccccgacagcttttctgatagtctgattaactatgggctggtggctgggtggacatggtggcacatgcctataatcccagagctttgggtggcctagtcgggacctgaagccaggagttcaagaccagcctgagcaacaaactgagctctcatctcttacaaaacacaaataaataaaaaattagtcaggtgtggtggcgcatgcctgtagtcccagctactcgagattgaggtgggagcatcgtttgagcccaggaggtcgaggttgcagtgagctatgatcacgcctctgcattccagcctggtgacagagtgagaccctcagctctaaataccaaaaccaggcggagtgcagtggctcacgcctgtaatcccagcactttgggaggccaaggtgggcagatcaattgaggtcaggagttcaagaccagcctggccaacatggcaaaatcctgtctcttctaaaaatacaaaaattagctgaccgtgatggcacgcacctgcaatcccagctactcaggaggctgaggcacgagaattgcttgaacccaggaggagaggttgcagtgagctgagatcatgccactgcactccagcctgggtgatagagttagactctgtctcaaacaaacaaacaaataaacaaaacccaaacaaaatgaaacaatgggctgggacttggggaatgggagggtgctacctgtggtagccagggatagttgtggctgtttcccattttaaggttaatttctctgcctggagggaggtgtcatgccattgactagggtggtctcaattcaggggagtccagcttggcctagaggcgccccacttttgtctgcctgaggaaaggtcatcactctggttggttctgaactcagtatccagaggctcagggaagggagtagactctcagttaaatatgctattattttatcaacgcggtaactcttcaagacttgaatggatctggaagctatggagagagagaaagaggaagggaggtagagagaggcgaaccaggcaggagcggacagccagggtgggaagaacagaggttgcaaggagagaaagtgaccagggtgggaagaagcagagaaggaagggcagggggaaagacgagagggggtgggaagggggtagagagtgaaagaaaccagcaagggccaggtgcggtggctcactcctgtaatcccagcactttgggaggctgaggcgggcggatcacttgaggtcaggagttagggaccaacctggccaacacggtgaaaccccatctcaattaaaaatacaaaaattggctgggcacggtggctcatgcctgtaatcccagcactttgggaggccgaggcgggtggatcacgaggtaaggagattgagaccatcctggctaacacggtgaaaccccatctccaccaaatatgcaaaaaattagccgggcgtagtggcaggcacctgtattcccagctactcaggaggctgaggcaggagaatggcgtgaacccagggggcggagtttgcagtgagctgagatcgcgccactgcactccagcctgggtgacacagcgagactccgtctcaaaaaaaaaaaaaaaaaaagaaggaaaaaaaattagctggacatgatggtgtgtgcctgtagtcccagctactcgggaagctgaggttggagaattgcttgaacctggaaggtggaggttgcaagattgcagtgagctgagatcgtgccactgtgctcccactgggcaagactctgtataaaaaaaaaaaaaagagaaatcagcaagaagagagcaacagggaaggaagggaaggtgggagtggagctgctgttgaaggaagcttcctcaggtccctgcctggggcctccctctcctgcatgcctgtgtgtgcactcacaacacctacgcatgcacatacaaggacacaggtgttcgcgaaagtgcacacgtgtgcactgacacccaccccctcaggcactgcccgcagaatctgcactgctgggtgtgtgggtgttgccacggtgactggtgctggagcatcaccttgtgggtattaatagcttcccctgaagccatcaaaacagtgacttcatcagccccagtctccctggcagtttccttcttcctcttcccttccaggatgggtctgggaagggtcttctggatcagagccaccacccaggcaccccacccctatgagctgccttggggaaggatggcaggaaggcctctgagttctgcccaaggtctgggggtaaggagactgctggccttctttaaccctctgagctgggtctaccctaagtccctgccagggaggagttgctggggcacaggactcctcagaagggccacgctcaacttctctgagtcctatgcagccacaccaacctcctctaggtcccttcctggccagagacctagttgactctaacagtggtgtcccctcttccagtacagagctccctgaagtactagggtgaaggtagagaggggcctagggcgtgaaatataagaggacctaattcccaggctcgcgcaagtgcaagcttggtatctgcatgaacttgagagttggcgccttcttcaattttgcgccagggatgccttggctacctcatcctatcccagccctattgatactcccatcagctcctcaaccctcagttccctgcctttgtccctgacgcctctcaccttcctttgggactccctgggatcacgctgccctgaactgcagaacctgggctgcctctggactcaggtgagcatccgcctctggccttcacttccctccttccctttgacgtcttcctctctcccctgctttgcccatagccccaggtctaggccatgtggggcctgtgacatccctttgtcaggcgcggtggctcatgcctgtaatcccagtactttgggagtccgaggcaggtggatcacctgaggtcagcagttcaagacatccctgctgtgctctacctttggggcctcatcccctcccccattcccctgcccacaccaggcttccctggagccaccgtctgtaaatcctagctaggcccttgtacttcaaacacactctagcaggatgagtctcaactatgcagagtcctcatatttgttctaacttgtgaaaggcctgattctagtggccactcacagtgacttcattccggcagatttcagggggaatataagtgtgtgtgcttgtataggtgtgagtgtgtgagatagtgtagcggtgtgttagcacatgtgtgagtgtgttgccattaagagcctgtggatttctgatgcatgagtcattagctgggagtgagccttgggaagatactgcccataaataagacagccatccctgacctgctgtggccatctgcagctgcctgcacacgtgatcctgggcatctgggaggctggaggccgggttcggggctgcctttccctccagattccagagagacagtggctgtcacagatatttctagcttgcctggagtcccagacatttaagggtagaatgcctggaatggggatggagagaggagagtaggagaggaaaataaagggtggttcaggaggctctgcccccagggatctcagtggagcctcctggcccacagtgggaagcatgcattccacaattattttctgagaatctgtcacatgccaggcattcccccagtgggtaaggacaccctggtgaacacgactgacctgtgctctcccctcacagagcttatgttctagcagggaggcagaagataaacgaggaaaggctacttgtaaacaagttccatataaaagctatgatgaaaataaaatggaatattgtggaaagtgactgacagtggagggggtcctttagttggggcagtcagggaatgtcaggacacgaattgtgcctagataatgaggagctgccaaatggagacttgggggaagaacctttattacagaaaaggatacatgagatgtccccctgcccacccatgtcttcactggactctggatctgagttgctgaagccagagcagggagctagagatgacttagaggagcaggaagtctgattccctggggggaaccttggaacatcttccatccctgatagaccaggagagatgccccgggtccaggaaggagaagaatgacttctgtttcccttcctgaaggcttcttggtgcagtgttgagctacaggaaggcactagccacatgagcagggcccttgctgaaacccccttcctccaggaagccttctttgactgccataggctgcagaggctcctctcccccaccttgttatagctaacagaaccactcagttcagagctggtggtcttctgatgatctgtcccggagatctgttccctcagcttggccagagctccaggcttgtgagtctggtccgcgggcattcaaaggccctcagtggcatctgtgcatcagtgagactgcccggggttcctgctctgaacccttgccctagtgcccctagcctggctgagaacggagggtcaagtgccggggttctaatctcaattactttatccaagcatccgctcgctcatttacatgtttccctgggctctccactctgcgccaggcccggtacctggagctagggaaaccgaacattagtgctggctcgcccgcccccgcatccggggagctcggcgttctcgcggccctgctccccttgttttcaagtgcaagttccatgtttccgtgctgggaataaggccagccccgggtgccaccatactcgcctgatgtcttaccccgacccgcgccgccgagagcttgcggctacgggaacgcggcgcgccccggggccacatctggcctagcgggcgcgcgcgtgtcactaagacgctcattcaccggcgcagctgtcaccataacaaccggagcgagggaatcctggagactgccggggcggggggcgggggcggcggtcgcaggagggacccggcgcgggcgggaccgcggcggtcgggggacaccagctgcgtcggagcgcccagaacgccccgcgctccgccgagccccgctccacgcagacccgcgggcgggagggagccacgcacatcgccgccgcggccgtctccgcggggcggtaaccgagcctgcctcggagccgccgaacgcccacgccagcgaccctgactctatggccccgggggagcgcgccggagccgccgcgccgcccacccccagccggaaccctagcgtcccggggagcaagcggggagccccgggcgtccccggccccggcccagggccctgcttgtggcccccgctcccgccacggggcatgggaggcaggtagcccagcctgcgccaggacacccgtggcgggcggaacccgccaaggaccgcgaagtccagagaaaggaagctgaggagctgcccgcccgcccccggctgcagccccagcagggccctcccccggtggcgcgcacccgcgcgcgcacactcgcacaccgcacctcagcgcctgcccggcctcgcccccacccgcgagcgccgaacctcctggggccggatgccatgggtaacaacttctccagtatcccctcgctgccccgaggaaacccgagccgcgcgccgcggggccacccccagaacctcaaaggtaggctccccggccgagcgctgctggaggactggggcgcaggtggagggccagggaggtgtggttggggagggcgggcagacgccacctgttgtgcgtgtctggaggccggagatgcacctctggccgtggagtgggctgggggtggagggcagccggcgatgatggtgatggaggatggcgtcccgcggggtctgcgcagttctgtctgctggcactgggaacgtcactggagtcccctcaggccatggtcttaggcgagcctgaagagatgggaaaggatgtttgccaggtcgataggggagtggggagtgaggagggaagcttgggtcgtccgtgtctccagggaggcacctcgatgggtctcctttccatcggccctagggctggagagaccaggctgggagcactagttgcatttccaatgggagggttttaaaaattcaggacaggattacagcagcctggaagaaagggtcagagctgctggttcctggggtcctttgcagccgttgggtttttgcatccattgaattagtttgatttctggttttcccaaagaccagatatccagtcagagccctagaaaagagggtctgggagccttgaaacagagggacatttactaggaatgtctttgctcttcacctccccagatccactcagcaccctcagggtggccctaggcccagtctccccattcggagcctgccattcctgtcttggatcttccaatgctgtctctgacctttggaagacactgctgggtcctcccgggccctcagaccctactaaattccttccggaaggtgcttttctgtcacctcagaaccagtggcacttgtcctgggcatgatggctaaaagccaggaagggaagcccttgggctttcagaaagaataccccacttcctaagctcctcaggttatgagaaggataacaatagtgccctttaacacaaggcatcgaactttctcaaacacattttcagtgagcatggacactgcttggggtagtcagcagagcagagctaatcacactatacccattttacagatgaggagaaccaaggcttgcttcaggttcccaaagccagccagacctcggcgctaggtgctaggctgtagacccctatcttttgacttggaattctgtcccttcttttgctgaacagttaacttttaagaccagggaagaggaggagagataggaccactgtcctgcattctaatactccagctctttcagaacttcagctttcacttggctcaggaaaatcagtggatttgttgtgtctttctggaaattaatatggcaatacatgtcaagatactttaaaaatatcaatttgttggcagggtgcggtggctcacgcctgtaatccgagcactttgggaggctgaggcaggtggatcacttgaggtcaggagttccagaccagcctggccaacatggcgaaacactgtctctactaaaaatacaaaaattagccgggcatagtggtgcgtgcctatgatcccagctacttgggaggcagataggcaggagaatcccttgaatctggcagatggaagttgcagtgagctgagatcgttccactgcactccagcctgagcgacagagcgagactctgtcttgctaaaaaaaaaaaaaaaatcagtttgttgaccttgtaattctaccttgaggaattgatactaaggaagtggagatgcaggaatatatacttatggcactaggctaggatgttcatggcagtgttatttatactaggtggataacctaaatgctcagtaatcatggtatatattcttggtagagtactatgcagtgattacaattatatttgtgaagaatagttgatgactgtggaaaatgctcacagtataacgacagaatacaaagttgtgaagactgtatgatcccaattttgtttaaaaagtggtgtgaatgcaaaaaaccccaacaaaaacaaaacaagcaaaaatgcttgtaaagtttccaaagggttaacaattatttcctctgggtataggatcatatgggattgcattttttcttttttatattttgctcttttctaaaatttctataataaggaagtattatttttgtaatcagaaataagctatcagtgttagcaagtatgaagactgtttctgagcattggaaacagattcctaatgaacctatgaatatcgttcagctcaaccttctctgcaagtgagaataatgagggaaaagaataattatttgcccaaattaaagtggcaaaacttggccctgtccttcagggggcaagggttagctgggggcaggggttagttggcccttaatattcacagactatcttcctgagaaggtcttgctccatccttgactctgtggaaacccagagagctcccaactaattgcatctttttaatctaaaatttggaattgtggggatctgaggtctctgtggctagggtctttggcagaaggcaggagtgggggccccatccacacaccactgtaggtgaccatgggaattttgatcccgcccctactaagcctgaaatgaaggacagaaggtacccatgaaggccgccagttgttggctctgtccttcacccaaggtccactgatcctccttctcagcttgacttctaaggacttcttcccgtctttctaccctaatagagccatcacctttattctgtaattgtttagtgtttattcccaattctcttctaaatgtatcagcattgacctacgagtcttctctggtatatcagtggtcagccagaagttcattctaattgtgttggtgttgacctgataggctgtgatgctaactgcctagccagagttctgctgggatggcgtctgtactcagcttgaattcatctctaattcttgtcagtgctcatccagaaatttgctgggagtaggggtggagtgactgtcttgatttttttctctccttacataatttcagtctcttgattcctcaccattttaattaaaacaactggaagggacctggtataatggggatcctgggactgattggagatctaagattggtctggctgttaggctgacatgacatgggacatgggaccccaccatcgcctctcgggtgatagactttggtcttcttcctgggaacacactgaccccactctgctgctggtgattcccactgggttctgaacagcgttggtctaggagtgttcaggggagaggtccacggtgtagctctgggcttagaaccaacaggcagtgcccgaggagctcccatgtgcccagctcagagataagacacccctgggctttcccaggctggagatctactcaaaaggcatggatgagggagtgaatggaatcaagtgtttgcttggttgtactgtcgaaacccagatatgtgggcagaggtcagacaaggggtatcaggggaggatctgagctggacatggagggaactgcaggaactggacagaaagcaagggatgcagcagagtcctagggtgtggaagaagggggaaaggcactgacagtaaaggcttggaggggcttgagcgtatatctatatattacatgaaatagaaagtatatgtatatggaagttatgtatatattttcagtgaggggcacagagtgactggggtagggtgcacaggaggttcatgcctcttggagaaaaatacaaagaataaagattttcctccttgcccaggtctttctgagtgcctgactggatgggctacctccttttattttttatttttgagacggagtctcgctctgtcgcccaggctggagtgcagtggcgcgatctcggctcactgcaagctccgcctcccgggttcacgccttctcccgcctcagcctcccgagtagctgggactacaggcgcccgccaccgcgcccggctaattttttgtatttttagtagagatggagtttcaccgtgttagccaggatggtctcgatctcctgaccttgtgatccgcccgcctcggcctcccaaagtgctgggattacaggtgtgagccaccgcgccaggcccattgttttttattgtaaaatttatataacctgaaatttaccattttaaaatgtataattcagtggcatttagtacatttacaatattgtacaaccaccgcctctacctaattccagaatatttttatcatcccaaaaggaaatgccatgcccattaagcagtcactcctgttaccctctcccctgaatccctggaaaccacgaatctactctttgtctgtatggactcgcctattccaggcgtttaatatacatggaaggatacaatatttgtccttttgtgtcaagcgtcttttacttagcataatcttttcaagtttcatccatgttgtagcgtgcaccttttttccttttgtggttgaataatattctattgtaagagtatgccacatttcacttatccattcatcagttggtggactttaggatgtttctaccttttggttttcatgaataatgctgctatgaacatctgtgtctaagtctttgtttgaacacctgttttcggttcttctgggtatacacctaagagtacacctcccatctttcaaaaggtggtgcttcttgaattggatacttcacaaagtcactggttgtgacagttgtaggaaggccgtccccctccagctctggctgggtgtgacgccagcgagacacctgttgttttcagtctcttttctatgatggctgaggctgctggggggctgaaggagaagctgcaaaggttgactaagggtcttgattcttgtggtgggccagagtgtctgtagaccctgaatttcctcactactctctggggatgagagcaggggcaggggaaggctcatccttggacaaggtcttagctatttttctttctctccctccctccctccttccctcccttccttccttccttctcttcttccctccttccttccttccttctttccttcccttccttcctccttcccttccttcttttcttttcttttcttttctttcagctggagtgcagtggtggatcttggctcattgaagcctcaacctcctgggctcaagtgatcctcctgcctcagcctcccaagtagctgggaccacaggcccacgccaccactcctggcttatttctgtaggtttttttttaagagatggcatcttgccatgttgcccaggatggtctggaactcctggactcaagcagacctcctgccttggcctcccaaaatgctggggccactgtgctcagcctctagccatttttctgcattcacattctcgctgctacttcccctatctgagtcctcatcccagatattgccacagctgccatcctaattggcttctctgcctccggtccctccttcgatgctgccggagtgattctcccaaagtactatcttcatcatacccttccccgcttcagtcaccataatgggatattcaaggtctccattctttggtcaacccacagatcttccctcagctcttgtctgggctccttccttggttgtcatgacgcttgcagattaggtgagctcatccagctctccacccccgggaatgcagcagacggatctagggggtgcctggtggcctcctcagagtgactggctgcgtcagccccgtgttgaacccagagcacccatcctgcatgccctgttggttttcagttcggttttacctttgaaccctgttatgttaattatcataataatatttacaatagctaccatgcactgggtggttactttgtaccaagttcttatatgtggattatttccattaataccctcccaacaacctacagaaggaggtagcattgtcactgttttacagatgggggaaaaggggctaagagaggttaagtaacttatcccagtccacacagttagaaactgatggggctgggattcaaagccagggctctcagactttagagtttattattgtgatcgctgtattatcctgcccctgtagcatttagccttgggtgggctctgtctttcattgtgggagagagatgggggagtaatttttgcgtctctggacagagccccagggccgggaaagggcacacaatggggttcttgatgctttctcccttggctaaccagaagatcaggagggctgtgctagtctggaattcccagcctcctcccccttacgctttcttcggggttttagacactttggaggaaacttgtggttctttggggccagtgtttctcagagtgaggtttttctactgcctgcatcagcattagctggaagcatgtataccatgcaggttcccagcccccagctcagacccgctgactcagaatatattggggatgggaccctcaaacctgcgtgtttaacagggtcctcaagatctgagaactgttgtgactctggggcctcagaacagtcctactcttgcatgcttggaggaggtgggaccaggctcctcagaggaggagagcccagagttggatgggggagatttggaggggagctagaaaggtgtcttggtgagtgggctggcagcaaaggcacagaggcagagaaacacaggatgtgttcagggatggtgagcagtcctcttgcctggatgtggggtccccagtggggaggttaacaggtcaatctttgaaggtaggctagggtcatatcttggagggcctatgatattaggacgaggaggttagattttatcctgtaggcattgggagccatggacagcttttgagcaagatgcatgtagtgattttatttcaacagcaccaacagtggtggaaggcaggctggggagaggaggagatgaggcatcttgagctgctgagaggttcacagaggctgtcagccttctgtcctaggccacgctgaaagggctgggcgtgacagccaagctgacctgctcatctggagttcccatgggcaagtctgaaagcatttccaacccacagctatgggcagcaggaccactgctcataggcaggaaaaaaaaacaacaaaaaccagcaatgaaaggatttttaagaagcccaagttctgatgctaggtgtattcatgtaaataaattcatttaatctccccataaaggagaggtaggtattattcccactttatttattattattattattattattattattttgagacggagtttccctcttgtcacccaggctggagtgcaatggcgtgatctcagctcactgcaacctctgcctcccgggttcaagtgattctcctgccccagcctcctgagtagctgggactacaggcgcctgccaccaaagtccagctaatttttgtattgttagtagagacagagttttgccatgttggccaggctggtctcgaacacctgacctcaggaggtctgcccgtctcggcctcccaaagtgctgggattataggcgtgagccaccacacccggccattatttatttattgtagagacagagtctctgtatgttacccaggctagattcaaactcccgggctcaagcgatcctcctgcttcagcctcctgagtaactgggactgcaggcgcacaccactgtgccaggctcttattattcccattttatacacgagacagctgagattaatggatgtgaagagtgctgcccagaaacactgagctaggaaagagcagggctgggatctctactcaggacaccaaagctgatcagcgaggaaactgatcttggggggaatttctccatattaggactcttttcctgggccctctgggatggtgtcttagtcggcttgttctgccataacaaaatactacagactggatggcttaaacaatggaaatgcattttctcagagtcctggaggctggaagtctgagatcaaggtgccagcactgtcaggttccattgagggccctcttcctggctttcaggtggctccttcttgctgtggcctcacatggcctgtccttggtgtgtgcatatggagcgagaacgatctttctctcttcctcttattataaagccgctaatcctatcagatcaggacctcacccctctgacctcatttaacttaattacctcctaaagaccctatctccaaatatagtcatattgggcattagggtttcaatatatgaatattgagggggcgggtaaaattcagtccatagcagatggcatgtgctcacttccaaggtgtgcacagtgaggcacaggcattggttctaaatcacagagcccaagatggaggcaggacgagcaaaagcagtaagaaaaggaggaagagtgaggataggaaggagggtgggagctgggcactgcccagggtgtgccagggccgcctgtttcctgttagtttgtgcctgtctcattcctggacctgcacacccaggggctagaactgaggggctgcttcacgctgagccggttgctttggcaaccctgggcaggatgcaagtggtctccttggtaacgcctgggaaacctgcctcagggatggagggaagtgaactggccagcatcaggctcggtggcacaggcagaactggccctggctgctgagacaagctggccgataggagggccagcttcccaaatagcctgggctgccttttggccatttccagcaagccagagtccaaaggccctgtggagcctgtgggtcccgcctggccagaccagaggcgctaatgggccagcccaggaagtgggaggtggtgaggggctggggagagggagaatatagcttctggatgacagatccagctccagagtttattaaaagatgcttatcaggagtcatcccccggatggctttgggaaatgagcaggtgttgacacttgtagggggtaagagggcagaacttagagaaaaagaagggctaagagaagaggaggaggaataagcaggagtcactgggaggcaggtgggaggccttggctttttctctgctctagtgacagttccaaggggaggtggggctctggcactgggcttgggaactgaagttctctgaggatgagagttggggtttgtgggatgcactgatggggacggtaagaggtaggtgggagagctcatttcattgttaaactaagcatcagctgagggccatcagccgtgggctagacaccttcctgggcacgccgatacggtgagaaatgcaataggtgagtgctcaccacttccagcttaccctttagtgggaaggcagatgggaacaaaaatgacaaatgcataaaaatgaatctggagatcacaattgctaacatatatgtgctagagctcatgctgtgctccccctggcttttttttttttttttttttgagacagggtcttgttctgctgcccaggttggagtgcagtggcgtgatcacagctcactgcagcctcaccccccgggctcaatggatcctccctccacagcctcctgagtagctaagactacaggtgtgcaccatcatgcctggctagtattttatttatttatttatttatttatttatttatttatttatttatctttttggagacagaatttcactctgtcgcccaggctggagtgcagtggcgccatctcagctcactgcaacatctgccttccaggttcaaggtattcttctgcctcagcctcctgagtagctgggattacaggcacacaccaccacgcccggctaatttttgtatttttagagagctggggtttcaccatgttggtcaggctggtcttgaacccctgaacttgtgatctgccctcctcggcctcccagagtgctgggattacaggcgggagccactgtgcctggcctgttgtcatgttttcttagtctccctcctcttggttgtgacaatttctcacactttccttgcttttgatgaccttgacagttttgaggattactggttacgtatttgtagactgtctctctattgggatttttgtggtgttcttctcatgattagattgcggttttaggttttggagtgaaagaccacagaggtaaagtgccatttcccatcatatcaacggcacatgctgtcaacatgactcattgctgttgatgttgaccttgagcgcctggctgagggagtgcttgtcaggtctctccattgtgcagttaaagttacactttcctccctttctattgcattctttggaaggaagtcactgtgtgcagcccacacttaagcggtgggggggttacgctccacaggggtgggtgtttacgttccacctcctggaggccagaggccccgctatctttaacagttcttctccactacttctttaatttcttacccaaacaattatctctgggtaaaggctttgaaggagaaactagggagctataaggggggaacttgacttggtcttggggatcagggaaggtttctctaggaagtgacctgaaaatgagtaggggttggcctcagttcctagatgggaagctactagcacgttaggcgagaactgttcatttctcatccttggcctctgccgattaaatgccactggccgctccaaatgccaatgtgccattaaaaaaataatagctctcctgtatctttttttttttttttttaaagaaacaaagtcttgccttgttatccaggctctggagtgtggtggttgtgaccttggcttgctgcagcctcaaccttctgggctcaagcaatcctcccacctcagcctcctgagtagctgggtctacaggcacacaataccaagcccagctaatttttttttttttttttttggtagacggagtcttgctctgctgcccaggttggagtgcactggtgcgatctcagctcactgcaacctccatgtctgggttcaagcaattctctctgcctcagcctcccgaatagctgggattacaggcacctaccaccacacctggctaatttttgtattttttagtagaaacaaggttttgccatgttggccaggctggtcttgaactcctgacctcaggtgatctgtccaccttggcctcccaaaatgttggtattacaggcttcagccattgctctcagccctggctaattttttaatttttgtagagacaggatgtcactatgttgcccaggctggtctcaaactcctggcctcaagtgatcctcccaccttagcctcctaacgtgttgggtttacaggcatgagccaccatgtccagccagccagctcttctgtatcttaaaaagcaccctagacggggcagtactaccccagttgagctgggtatggaggccacatgaagggtgttcttaggagaaggagctcaggactggctcagagctgctgccgggtacagcagggctgagccctggccagagtcaccccagccctcctggccaaggaactttcagcagaaaatcattaagtagctgcttccttgcctctcagaggtgtcccacccgcttctcactcattctgtccgtggaagtacattgctgatcacagactgtgtggggacaggggaggaggaggaggagagagggcccttcttgggatggggggacagaagagggaagtatgtctgctggcttacccagatggccttctttagccttgttgccctagaatgccatcctggctgctccagcggttggggtaaggacggaaaagggagaacgttgacaggcgaggttgctaggattaagatgatggcaggtccacatgctcttggctttcaccttcatccttcccacttggcttgccccagcccctgcctggtgtctgctgagaggctgatgttctccagggcatggggcagtccagagtatgtgtgtccaagtatgggtgtccaggtgcccctgagagggaggggaggaggcactctggcccaatcagggtagaatgaggctgtaaggatattctagctgattcatttcatgtattggtgcctgctctgagctaggcatggtgctgggtatggagaattgagaggtgagtactgggcatggtctctgccctgacatactcagggccctgccttgtccaattcagtcggtccttattggcaggagggtcctcccttcttcctcctcctcctcctccttcacgtctgctgtctgctttttttttttttgagacggagtctcactctgtcgcccaggctggagtatagtggtgcagtcttggctcactgcagcctccacctcccgggttcaagcgattctcatgcctcagcctcccaaatagctgagactacaggtgtgcaccaccacgcccagctaatttttgtatttttagtagagacagggtttcaccatgttggccaggctggtcttgaactcctgacctcaagtgatctgcctgcctcggcctcccaaagtacgggggattacaggtgtgtgccgctgtgcccggcccacttctgctttcttttccttttcttgccctgctctttccagctaatgttcctttaaacacattcttcccgaagggagaaggtctggcaggtaccaagcacaggcacaaagtcaggcctgtgcttggttcctggtggaagggctggtggccactgattcaaacatcagaacccaagtgtatcatggagattgttttgccctacctgctttctcatctcaggtccccttggccccagagtgggaaagtgacctgcccaaggtcatacagctggattggaccaagcagtaacaagatccccaggctctgaccttgcaggatgatgctcttaggagctgctggaagctgactccagaggaacacctgagggggacaagtgctggccctaaatgtgatgcagatgctcctctgcttagagtgtgacgcctgaggggagtcactgaagagccttaaacagaagagtgacaggatcacttagatgtgctagtaggctcttggggcaagagatggggaggggtggagaggggccaggcaggagtccactgcagtcctttatgcaaggagagaggtgtggcttctgtcagagttgggcaggcgagcagattgactcgggagatactttagaaggtcaacttgaagctctggaggtgggtccaggagagggagctgttggggagctgcttgtgccatctctgaatcctgacatctgtggcagtggtcaacatgcacctgggggctctgtggaaggtcagggtgtgcacacttgggacctgtgctcctgccgtgggtgtgaggttttacagccaggaagagagacaggtgagcaggctgggcaggctctgagctgtggttccatccctaccccttgggacaccatcaatcattaatgtcctctctgcctgtcacaggtggctcccaggagggcagaggcagcacctgcggtgtgatgtgcacctggcttcttttctgccagggacctgcagccctgccccagccaggctctctcaggtggctcgcctccctgtaggttccagttcccagccacacacacacaagcccctgaaaggtggccataaatcagccgggacaggccaaggttgctctggctttcccagagtggagatcaaagccccagacccccaccctggggctcagcacttattaaattataaaactgtcaagggatggacaagcaagagggactggatggatggccctgtagtaaaacagaatgcggaagagcagctgagaaccaggcaacagctgggaaagtggggagaggaggaaacgcctgtttgtctccgcccctgggcttggggacttctcacagggtcaggtccctcgaatttgaaaagcatgtaaccaacccctctcccctcccatgacagaattcacagcacactttacagaggagacactgagtccgaattgccacaggactgtgaaagtccgatcttccaaatctcactcagattcttcctgggtctcttcatgggacctctttgaattagcattagggtgacatccatttgcgactctcatcctcaggatacagctaggacctctttctgtctctgagcgccctgacttctcttccagccccgagggacaaaggcagaccttggactcaatggagtgccagccctgtctgggtggacagactttctcacccacccctccgcaagtcccatgcaggaaaccccctctttggagggctgagagggcttagccagtgcctgagaggggcagaaggggttttccctttctgaggctggcgtttgcagatctgtgggactgaggagaccagccagacatgcagaccctgatgtgggcccaggggttggaggaagcggttgggataggtcatgagggagcagaatgccactcacatgaaagtttcggcctcagagggcagcccgccaggaaactagggctctgtgtgcatgagggagtcctgcctccttcacagcaaaatgtgaaagaagctgttttagggatcttgggtttcctcatctgatcccccaagttgaggttgtgttaaagaaaccaaatacagggtcaggtgcggtggctcatgtctgtaatcccagcactttgggtggctttggcttagcttcacctccttagcacgaggctgaggcgggtggatcacctgaggtcaggagttcgagaccagcccggccaacatggcgaaagcccatctctattaaaaatacaaaacaattagctgggtgtggtggcgcacacctgttagtcccagctactcaggaggctgaggcaggagaatcacttgaacccaggaggcagaggctgcagtgagccaagatcgcaccactgcactccagcagcctgggtgacagagcaagactctgtctcaaaaaaaaaaaaaaaaaagagaaagaaaccaaatacagttgtgtgtggcttaacaatggggacacattctgagaattgtgttgttaggcgatttcgtcataggggaacagcacagagtgcacttacacaaacctagatggtgtagcctcctgcacatctaggctatgtgttgtggcctattgttccttggctacaaacctatatagcattactgtgctagataccgcaggcagtggtaacacaagggtaagtatttatgcacctaaccatagaaaaggtaacataatgcattgcacgatgatgttatcatggctacgacatcactgggtgataggaatttttcagctccgtcataatcttatgggatcactgtcttatatgtgatctgtcattgaacgaaatgtcattgtgcggctcatttctgtataagaagaggccagatcggcttttgaagagagagctccctccccaagattcaggactttttctgaaagtggaggttttctgtctggtgctaaggttctcagttcctgaggcatgaggtggtattttggggtgaaggtgctatttctgcaggcaagattttgggctgatcttgaggctcccatttgggagtatgggttccaggttgaggatgagggttccattcctggagggcaggtttccgtttcagggtccaggatttgtgattgtgtttcagtcttgtggtcaagagtccattttggagctcagtattctggaattgggttgagattctctccctgggtggggtttgatgatcagggtggaggtcttgtaccctgggaggaagggaagagctagaacctccttcctcttctagaggagacttcctggggccatcagcagatgaaggggccggtagagcaacctctgagctgacacctgggaggcccaggctccagccctggccttggtgtaagactgtttgtgggtaagtcacttataagctctaggtctctggctgcaagctttggccggacagtgatgttgactcacaaagcaccatccatgttcacttgagcttcccaaaatgacactaatggtgggctccgtagacacccacggccactgctttgcttggtgagtcaaatccatggtgacaggactcaggctgccctgggcactgccagcttggtccaattagtgccaattggatcttaacgtgtgctgagcggcccctggggagagtgagcacacatcgagtgggacatgttaaatctgggtccctggggcttggcatgtggctctgtggggcgggagatgggccaggttgggccaacagcccccctccttgtaggccagctcttacctaggccaggcagtgggcaaagacatgtggcaagccaggttctgaaggggcccagctgtctcccttgtgctgtgctgaggggctgagacccagaggggctgttcttcacccctggctgggctgacccctgcctgagaaacatctgtgtctatataggactgccacccacacccctcctctgtttctctcttgctacctccaatgtggatccttctcttggagagctaaagttgctgggaagaaaaagttccattccatttgtcctgggctttgagctctgggaagccctcttccttcccaggtgttgctcaagacccccctagaagtttctcaggcaggcggtcttggccttatttcctggatgtttccaggccaccccccgccgctgtttcccatttccactgcccaggtcacaccattgccagtgggccttgaatgggggggctcctgacttggcctcttagcccgcatccaccctgctgcaggtggacttccccatctcagaggccctcctttgttttaccaaaacaggcgacaggataggagtgagtgggggacatgctttccaggtctagggcaatctcttctgtgctctgaaaggacatctttgggatagagtcctttccctgaagtgcaggaaactcaggcacttgagaagagggggaactttctccaccagccagtctgtcccagggacacagggggagctctgggtctgcagggacccccaggccccctctcttggcctggccatggaacctgagaggctgagaggcctgggggtcccactgggctatggaaacccaacccacatgctgacgctggtgcagcccagcaggcctctggaattctccagcagcatctgaggggacctggggtgcaaggagggaagaggaaaggtaggcaggatagaatgcactgtagccaaggcatagactctggaattggactttgtcttggctccctgggcctcaaagcttaacttctccatgtcctaattccttatttgaggtaatgcttgactagtaataaaagcataataaatattagctatggttgccatcgttgggctcatccttcaggtcttggcttagcttcgcctactctaggaagctttccctgaccaccgggtgggttagatggcttctgctgtccctctctggctgccctgggcttcaccatcctcgcactgatcacactagctgccaggcctgtttgcttgtctgtattttttactgtctctcttgcttactgctgtatcaccaccaccagtgcctggcacacacagtaggcactcaactatgttttgaaattaatgcaagaatgggctgattctggggaattcaaacttttcttctatgggctcttcagggctgccgcagccacatccagttagttctctgctgaaatgacattttctgaataccaggctctggagcccagacaagagcaagatggaaccattgcttcattcattcattcattcattgatggcacagatgttctttgggtgctctttaggtgtcaggccttgtgccaggctctggagacagacatggttctgcccttatagaacttgtgctgctgatcacttgggcagagggaggtcagaagtcagaggagagagtggtcagttaggctgaatggaatcagggagaacttccaggagaaggggtttgctttgaagaatggtggagaagtttagatggacagagaggggctttctcttgggagtgggcaaggagctgatggaggagatggagccacctatgtgtagccatgaggcaaggctgaccagtgacagtgtggcctgaggctgtgcagccaacccacaggactcaaaagctgtggggaccattggtcctggctctgccagccacagataggtgaccttgggcagggcacttctctgtccctccaagtagtttagtcatttctaagatgggaactggctgggtgaggtggttcatgcttggaatcccagcactttggaaggctgaagtgggtggattgcttgagcccaggagttcaagaccagcctgggtgacatggagaaaccccatctctaccaaacaaacataaaaaggacgggagctgtgctgctcggcagtttccccagcgcccgcagggttgggctgggctcaagggcaggtatgtgtggagggaggcttgtgtgggaaaggggagggcttcaggtgtctctgttttgtaaataattaaattcttatcttaagctagttgtgtccacactgagggaggcaggagggggactgggaacaaggtgctgtgttgtccaggaagtggctgggtcccttctctcccctcttccctccctcctggcctcccagtcaaggcaggtggtgggggcccctagggtcttctcgtctctggctgcctcactccttccccgtctttctctctccctctaccttctcatttctggttccctgtcacattcccacctctacgacataaaggaccccctgcccctctccattgacacccccccaggccaccatggccaccatcacccggtgcccacccggctttgctgcctgctgaagtcttgctcgctccccagcagccctccctggcagcccccaggtctgctgagcctctcgggaggcctcaggggagcactggcctctcccttgccccagtgctccagagacaagcaggcacattttcatttttagtgcttactactgggaatgtgaaggtctgtttagtcttgtccagctaacataaaccagccggaactgggccgtggcagggaactttgctgtagttcccttatttggaatgaaattcattgtttttcactgggaggtattgggggctttggggaggccccactgggccctgccccagggtgtggcctgagtggcctctccaaggctcactgaggtgcctgtgccacagaggctagccctgggatacctcagcccctgccaggttcacagactgcggacagccgcgagccacgcctagtgcctcaggaatggagagtgtctggggtcatgtccaactctgtcagttcacagaggagaaactgaggctcacagaggagcagggacctacccagactcacagggcaagttgaagcaggtggaggtctagaacccagggcccctggtcctctggttctcagacctctatactgtggggccagggtgcctctggcctaggagctggtgagggtggggggtgggaggacaggggtgcggatgaatctggctggagtggtctgcagcttgggaatcccccaaggcctctggggcaggctagtgtgaggcctggggcagtgaggccgggggagggctgtgggagaggaggaaggggaggtgagaggagagggagaggtgtccaagaggctgggggagctggatccggccctgaccccgctgttgtcagtgtgactttagccttggtttcccccatctgtcccagaggctcagtctttttactttttctctttctttttgcacctctcccaggaggtctcctggatgaactgagttggggatgtttctttttctttttttttcttttttttgagacagagtcttgctggagtgtagtggcacgatcttggctcactgcaacctccgcctcctggggttcaagcaattctcctacctcagcctcccaagtagctgggactacagcatgcgccaccaagcccagctaattttttttgtatttttagtagagatggggtttcaccatgttggtcaggatggtctcgatctcttgaccttgtgatctgcccacctcggccttccaaagggagtgtttcttacctgccatggaccgcgtccccgggctggttactatccctctctgtgcccaggctcctttccttgtcaagtggagtgtggactctccttgaggcctctgctctctgacccctcctgccccagcctgggccatctgcccctgggcttctcttcactctagactcctgagtctgcagggtctggcccctcagacccaaaagtttgtctggggaagtcctcctgctcagacccccagccctgcagagagggcagggctggtggagaacagagggagtagcccctggcactgtggcaagggagtgagattgacaggcagatcttgggttcaaaccttgactctgacacttattaactaggctattaatttggggcagctacttcaaaacccagggaccctaagggccccatacgtaggatagggagtggggcaggaagcatgcatgcccagggccaccgacaggggtgtgctcaactctaggtgcctcaggccagccttggggctctctctggacagccccctctccccatccacctcaccaccctgtggccttagttctatctcagtctactcaagaaacatcaggctgggcaggtggctcatggctgtaatcccagtactttgggaggccgaggcaggtggatcacctgaggtcaggagtttgagactggcctggccaacatggtgaaactctgtctgtactaaaaatacaaaaattagccaggtgtggtgatgggcacctgtaatcccagctattcgggaggctgaggcaggagaatcgcttgagcctgggaggcggaggttgcagtgagctgagatcacgccgccgtactccagtctgggcgacagagcaagactctgtctcaaaaaaaaaaaaaaaaaaaaaaaaaaaaagaaacatcaagtgtgtgtttagatattctttccagaggaagttccccacttcacatcctttaaaataacttctcatttactcacttattcttttcacaggaaacgcacagctgggacgtaggaggctgtaactgaccagtgtgggactggaaaaggaaagagagatgttagaaagtgtgggcctggggaatcctaactagaaggcccctggtgctggggaaattagggtaggagatgctgcattgtttactatgaaaattccagtcactgctcttttagcagtcatgctagtacattagccaaggctgtttataaaggtatagtaaactttcacttctgcaaggtcagtgagactctcatttgcaaaagatcatcttgttgccaagaacaaatcaccacctagtgaaacatttagctcagccatgaaagtgaaaccagatgacgaatgaactagtgtccacacagaccctaggtgtctctgggcagtaggagctattgaaagttttagatttgctttttggaaagatcgtgctggctaccctgtggaggatggagttaagagggacaagttggaagaccacttatgaaggaagtgaagttgtctaggggagggatgctgaagcctgaactacagatgtggtccaagagaggaaggaacacgtttgaaacatatttaagaggtgtgctttggccgagtgcggtggctcatgcctgtaatcccagcactttgggaggccaaggcaggtggatcacttgagtccaggagtttgagaccagcctgagcaacattgcaaaacaccatttctacaaaaatataaaaaattagccgagtgtggtggtgtgcgcctgtagtcccagctacttgggaggctgaggtgggaggatcatttgagcctgggaggtgaaggttgcagtgagctgagactgcacgactgcactccagcctgggtgatagagtgagaccccatctcaaaaaaaaaaaaaaaaagaaaagaaaaaaataaaaggttgtgtttggcagcactgataactgaatgatgcaggcggtgagagtgagggaataatccaagattattcctggtgccaggttttcaggtgactgggagaatggtgatcccatcaggaccccaagcagaaggcgggggttggagggaaagatgataggttgagttttggccagggtgtgtcagaagagccctgagatatcctgggggagacgctgggttggcaactccatgtgtgagcttgaatctcagaagagagatcagggccacaatgagttgtcagcagtgggtgtcacttaaaccatgagagtggttgaaatatcacagggtggacagaatgaaaccatgaagaaggtgtgggagaggtacaaggagaatcaggaaaggtcagagggccagagaggccaagggagcagagtttagaggtatgatatggcacagtgcagtggttctctaagggcctacgaattgcctggagagcttggaaaaatgtagattcctcctcaggggacctggaataaccagtacgattctggaagaaagaaaaacctggaggacttacacttcctgatttatttactttcctttctcctttctcctttcttccttcctccctccctccctccctctcttccttccttccttccttctttggaagaaaaacctggaatacttacacttcctgatttatttcctttccttttcctccctccctcccttcctttcttccttccttccctccatccttcctccctccctccctcccttttcttttttcttttttgagacagggtcctactctgtcacccaggctggagtacagtggcgtgatctcgtcttactgcagcctccacctcctgggctcaagggatcctcccacctcagcctcctgagtagctgggactaccagcatgtgctaccacgctcagttgatttttaaactttttgtagagatgaggtctcactatattgctgaggctggtcttgaactcctaggctcaagcgatcctcctgccttggcctcccaaagtgttgggattacaggtgtgagtcaccattgtgtgacctgccctataccattactcaccttcttcaaacttctaataataaacaagaaatacctactgtttaatgacctcctactgtgtaccaggccctgagccccaagacccacagctctgacctcatttactcaacacaatggctttgtgagctaggagctaggtgggtcagcctgaggggctggtttccgtagtgagtcctctcctgcccacatctggcctttgcctgagctggccccaaatttcatctcctctgtgtctcctctgagttgataggactggaagcccctggctgtctgtaatcaagtccacaaaggttcatgagtcaaatcagaagtcaatgtactgtttcccaaagagaaattttctgtcagatggacttcctggcaccttctcccctgcagcagctctttgagtgctgggtgaacttgctctaggcctggcaagttgagaacacagtctgagagttcaatgcctatgggctctgagccttgcccaggccacttcaccaacagggaaatgcctgccaggaggacccaacacttgggcctggcaggccaccatctccctggctctgctcccgtgggcctcaccgcagtgtgcctcagtgacatccccttttcaccgatctttggcatccaatgaacacatcttttcttcacctccagccaggtatcctttatgtctcttgagggtaactttgcatgccctgatccatgaacagtcaatttcctagactgaaatttgggaaagcttattgccaagagccatggactgggagtaccttattttgcccctttctccacttactgcccacacagtttcaggaaggaagcagtgggttaagtaaatgatgacgtctattcacaggaataccttgcagctttacacattaatgaggtaccatgatttaaaaaaaaagtctactatattattaaaagagcaaattgtgtaatatgtatagtatgggcctgtttgcatttagagtgctacatttttccttccccctcttcctctcccttcccttccctccctctctctccctcttttctttcattcctttctttcaaccagtatttagtcaatgcctactgtgtgccaggcactgttctaagtactaggatacagcagggaacaagtcctctgtctcatggaattatattcttatgaagagagacagatttttaaaacccaaaaacatgacatatggatgtcagatgatgaaaaatgccctggagagaaagaaaccatgagtgaggcagatacagggattatgagttggggggtctggggaacagcactttgaataggttgggccagagaagacctgatggcatttgcaggaggtgagggagtgagcagtgcaggtatcttggggaacaactctattctgtggttccataccttgatatctacctgtgcatctagttatcactcagacatatttactttgtttgtttgtacacacacagaccaaggctgagtggatacccacccaactgttaccaggggctacctctggagaattggctggggttgagtagtgttggggaacgggatgcttttactccacacaaatcagtactgttatatttatttatttttaacaataagcacatattgcttttacagtttaaacttttataggcgcagtgtctcatgcctataatcccagcactttgggaggctgaggcgggtggatcgcttgaggttagaagttcaaaatcagcctgggcaacatggtgaaaccctgtctctactaaaaacacaaaaaaattagctgggcatggtggcgggtgcctgtaatcccagctactcgggaggctaaggcaggagaattgcttgaacctggaagatggaggttgcagtgagccgagatcgtgccatcacactccagcctaggcaacagagcaagactctgtctcaaaaaaaagaaagaaagaaagaaagaaaaaaacacttttttaaaaaatgaacttttatagccctgtcccctcccaaaagagagtatggtcagcagagtcgtcttgctgctttgaccagtggtatcaaggaataaatgagataattgatacgtgattgccagtggttgtgcctatgtctagaaaaggttaaattttgtttccttctcatattcttcccctcagtgcccaggcagggctaggtatccagaagtgcataatataaccacagtggagtcctgggctcacctgccttggtgcaagtccctgggagtcagtgcctgggctccacatcgtatgcatctgagggctggtcgggtctagttccctccatagagattaaggaaccccttaagggcttatccagaagatgccaaatctcccttgagcctgttgttttgggccacctgtcctggacatcacattacaccatcgtcatcacttttgtcaccattttaaactctactaccatcaccagcaatagttttttgttgttgttgttgtttctttttttttttcgagacagggtcttgctttgttgtctaggctggagtacagtggcgtgataatggtttattgcagccttgaccccccggggctcaagcaattctcccactttagcctctgagtagccgagactacaggcatgtaccagcatactctggctaatttttaaattttttttagagatgggtcttactatgttgtccaggctggtctcacactcctagcctcaagcaatcctcctgcttcagcctcccagagtgctgggataacaggtgtaagccactgctcctggcccagatagttgctttaaaaacagtttattgcttaaatttttataaaggtaacatatacttttaggaaaatccaagaacatatgaaggaaaaaataagaactcacttataaatgattaaagtcagtgtcacgtacgtccgtgtgaagagaccaccaaacaggctttgtgtgagcaataaagctgtatatttcacctgggtgcaggcgggctgagtctgaaaagagagtcagtgaagggagatacgggtggggccattttataggatttgggtgggtagtggaaaattacagtcaaggggggtttttctcttgcaggcaggggcgagggtcacaaggtgctcagtgggggagcttctgagccaggagaaggaatttcacaaggttaatcactcagttaaggtggggcaggaacaaatcacaatggtggaatgtcatcagttaaggcaggaaccgaccattttgacttcttttgtgattcttcacttgcttcaggccatctggatgtttacgtgcaggtcacaggggatatgatggcttggcttgagctcagaggcctgacattcctgtcttcttatattaataagaaaaataacataaaatagtgtcgaagtgttggggcagggaaaattttggggggtggtatggagagataatgggtgatgtttctcagggctgcttccagcgggattagggttggcgtgggaacctacagtgggagagattaagctgacggaagattctgtggtaaggggtgatattgtggggttgttagaaggaggatttgtcttatagaatgattggtgatggcctggatacggttttggatgaattgagaaactaaacggaagacacaaggtctgaataagagaaggaaaaaaacaggtattaaaggactaagaattgggaggacccaggacatccaattagagagtgcccaaggggttcagtgtaattacttgcttggttggtgagtttttgggctctatcctggacagagtcctcctttttaagttggaggctgagcttcgtgaggtgtgtttttaaaagaccattagtccgttctacctttcctaaagattgaggacagaaaggggtatgaaggttctactgaatacccaaagcccgagaaactgcttgggtgatttgactaataaagggccggtccgttattggactgtatagaggtgggaaggccaaaccgaggaattatgtctgacagaagggaagaaatgaccgcagtggccttctcagaccctgtgggaaaggcctctacccatccagtgaaagtgtctacctagaccaagaggtattttagtttcctgactcgagacatgtgagtaaagtcaatttgccagtcctgggcgggggcaaatccccgagcttgatgtgtagggaagggagggggcctgaacaatccctgacgagtagcagaacagcagatggaacactgagaagtgatttccttaaggatagatttccatgatggaaaggaaatgagaggttctaacaggtgggctagtggcttgtaaccaacctagaagaggttatgaaatgatgatagaatagaatgggcccgtgaggctggaaggagatattctccttggtccaagaaccatttgccttgtgtgggaagagattgataggcggaagtttcattgggagagtaggtgggagtgatcgatgagaaggagaaaaactggccataagggacagaagttggaatgctagctgcccgggtttcggcaccaaatgtcatgtgtgtccatgtgaagagaccaccaaacaggctttgtgtgagcaacaaggctgtttatttcacctgggtgcaggcgggttgagtcagaaaagagagtcagtgaagagatagggttggggccgttttataggatttgggtgggtggtggaatattacagtcaaagggggtttttctcttgtgggcaggggcaggggtcacaaggtgctcagtgggggagcttctgagccaggaggaggaatttcacaaggttaatcactcggttaaggtggggcaggaacaaatcacaatggtggaatgtcatcagttaaggcaagaactggccattttgacttcttttgtgattcttcacttgcttcaggccatccggatgtttacgtgcaggtcacaggggatatgatggcttggcttgggctcagaggcctgacagtcagcattttgatgcgtttttttttctgggtcttcatttttatgttcttaaaagtcctcttgccagggatggtggctcacgcctgtaatcccagaaccttgggaagccgaggtgagcgggtcacctgaggttgggagttcgagaccagcctgaccaacgtgaagaaaccccatctctactaataatacaaaaaaaaaaaattagccgggtgtggtggcacatgcctgtaatcccagctactcgggagagtcacttgaacccgggaggtggaggttgcggtgagccaagatcacgccattgcactccagcctgggcaacaagagcaaaactccatttcaaaaaaaaaaaaaaaaaaaagaagtcgtctttgtctcatgcaatcagaatgaaaccttattggtttgttaggtaaaacatcaatgtagggaatagtagtataaaataatacatacataaatattttcaccaaaacacacgaatttgcatttactagttggtgtcttgatgcagagccatgatccgctggttggaattccctgagtacctcttgtaggaaccctcctaaggcacgctctccagtagtcagttttggctgctttgaagtgcaacaggagcctaaagatgcttttgaattttttaggggcaaaatccttctagttttttttttactgaggattttatagttgtcttgcctgtatataatttgacagtattttttagcctttattatttttaattgtcacataataattatacattttatggggtacagtgatattttgatatatatagtcaatgtgttataatcaaatcagggtaattaacatgtgtatcaactcaaacacttatcatttctttgtgctgggaacattcaaatccactctcctagctatttgaaaatatacagagccaggcttggtggctcaagcttgtaatcccaacactttgggaagctgaggcaggaggatcgcttgaggctaggggtttgagaccagcatgggcaacatagtgagacccccatctttacaaaaaataaaaaaaattgccaggaaggttggcacatgcctgtagtcccagctactctggaggctaaggtggaaggatcacttgagtccaagagtttaaggctgcagtgagagatgatggcaccactgcactccagcctgggtgacataacaagaccttgtctcaaaaaaaaaaagaaaagaaaaagaaaaaaaagtacaataaattgttgttagttatagtcaccctatagtgctatagaacactagcacttatcccttctatctagctgtgcttctgaatctgtaaaccaacctttggttatccctctcccccttccttttccctgcctctggttactattctgttctctacctctatgagaacaacttttttcacttccacatatgaatgagaacatttgctatttatctttctgtacctggcttatttcaatatcgtaatgtcctctgagctcattcatattgccatgaatgacagaatttcattttttaaatggctaaatagtattccattgtgtatatataccacattgtctttatccatttacttgttgatcgacacttaggttgatttcatatcttggctattatgaagagtgctgcaataaacatgggcgtgcagctctttgacataatgatttcctttcctttggatatatacctagtagaaggattgctgggtcatatggcagttctgtttttagtttttctgaggaaccttgatactgttttccataatggctgtactaatttacattcccgcctgcagaaagagttcccctttctctgcctccttgccagcatttgtaattttttgtttattttgataatggccactataactggggtgcaatgatatttcattgtcattttgatttgcatatccctgatggttagtgatgttgaacatttaaaaatatatacttgttggttttgtctgcattcttttgagagatatctattcagctcatctgcctgttttttaattggaggatttttgtttgttttttgctgttgagttgtttgagtcccttgtatattctggatattaaccccttgtcagatgaatagtttgcaaatattttctcctattctgcaggtgatctcttcattctcttgattatttcccttgctgtgcagaaacattttagtttgatataatttcatttgtctacttttgcttttgttgcccgtgctttgaggttttctttataaaatctttgcccagaccaatgtcctgaagcatttcttctatgttttcttctagtagttttatggttttgggtcttacatttaagtctttagccaattttaagttgatttttatatatggtgagagatacggctctagtttcatttttctgcatatggatatccagttttcctagcatcatttgttgaaaagactgttccatccccagtgaatgttcttgtcacctttattgaaaatcagttttgctataaatacatgggtttatgtctggatttcctattctgttccattggtctatgtgtctgtttttatgccagtgccatgttgttttggtctttttaatatattttgaggtctggtagtgtgatatgtctagctttgtcctttttgctcaggattgctttggctatatggggggtggggtccatagaatttttaggattgttttttctatttctgtgaagaatgtctttggtattttgttgtgagttgcattgaatctgtagattgctttgggtggtatggtaatgttcacaatattaattcttttaatccataaacatggatgtctttcagtttttttatgtcctcttcaatttttttcatcagtgtttaacagttcttattgtagagatctttcacttctttggttgaatttattcctagattttttttttgtagttattgtaaatgggattgctgtgtttctttttctgctagtttgttgttggtgtatagaaatgctactgatttttgtatgttgattttgtattctgaaattttactgaattcatttattagttctcagagtttttttggtggagttttttttctttctttctttcttttttctttttttttttttgagacagactttcactctgttgcccaggctggagtgcagtggcatcacctcggcccactacaacctcctcctcctgggttcaagccattctcctgcctcagcaacccaagtagctgggattacaggtgtgcgctacaatgctgggccactttttgtatttttagtagatatggagtttcaccatgttggccaggctggtctccaactcttgacctcaagtgatccaccagcctcctcctcccaaagtgctgggattacaggtgtgagccatcgtgactgtaagtcttttgtttttctatatatgatagtttatatgcaaatagggacaatctgacttcctgttgtctaatatggatgctctttatttttttctcttccttaattgctctggctagtacttccactactgtggtgaataaaagtggtaatagtgggctttcttgtcttgttttggatcttggagaaaaagctttcaacttatcccctttcagtatgatgttggctatgattttgtgctatgtggcctttactgtgttgagatatactccttctatacctaacttgttgagagtttttatcatgaagggatgttgaattttatcaagtactttttgtgcatctattgagaggagcatatggtttttgtccttcattctgttgatgtgatatattgtgtttattgacttgtgtatgttgtatccctgagataaattctgcttgatcatggtgaatcatctttttgatgtgctgctaaatttggttgaccagtattttgttgaggattttttgcttctatatttaccagagatattggcctgtagctttcttttttttgttgtgtacttgtttggttttggtatagggtaatgctggcctcattgaataagtttagaagaattctttcccccttaattttctggaagagtttgagaagaattggcattagtttttcttcagatgtttggtagaattcagcagcgaggccatcaggtcctgtgcttttctttgatggaagacttattatagattcaatattgttacttggaactggtctgttctggttttatatttcttcttggttcaatcttggtagatttcatgtgtccaggaatttctcaatttctgctaggttttcttttcttttcttttcttttttttttgagacagtctcactctgtcactcaggctggagtgcagtggcacgatgtcagctcactgcaacctctgcctcctggtttcaagtgattctccggcctcagcctcccaaggagctgggattacaggtgcgtaccaccatgcccgggtaatttttgtatttttagtagagatggggtttcaccatgttggtcaggctggtcttgaactcctgacgtcatgatccacctgccttggcctcccaaggtgctgggattacaggcatgagccaccacgctggctggttttcttttatttttctgcatatgaatgccaggttatagcgactaggctttctaatttgtttgtgtatagttgtttgtaatagtctctaatgatcctttgtatttctgtggtatcatctttttttttttttaagtaaaagcaagtttattagagaagtaaagaaacaaaagaatggctactgcatagacagagcagccctgagggctcctggttggctatttttatggttatttcttatcatatgctaaattaggggtggattattcgagttttccaggaaaggggcagacaatgcctggaactgagagttcctcctccctttagaccatatagggtaacttagggatgttgccatggcatttgtaaactgttatggcactggtgggagtgtctttttagtatgctattggcactttcattgctatcttggttttggtaggttttgactggctggatttttttattgcactttttttcttttttttttggttttttttttttgaggcagagtctcgctctgttgcccaggctggagtgccctgacacaatcttggctcacagcaacctctacctcccaggttcaagcgattctcctgcttcagccttccaagtagctgggattacaggcatgcacaaccatgccaggctaatttttatatttgtagcagagatggggtttcaccatgttggccaggctggtcttgaactcctgacctcaggtgatctgcccaccttggcctcccaaagtgctgggattacaggcatgagtcactgcacctggcctattgtatctcgtttcatcagcagggtcttcgtgacttgtatcttgtgattccctatctcatcctgtgactaagaatgcctaacctcctgggaatgcagcccagcatatctcagtctcattttacccaggccctgttgaagatggagtggctctggtttgaacacctctgacatatttctccctccattttacaaggggacccttaatcctatgggttgtagagggatgaatatctatcttctctaacttctgctggctgaataggggtgatgatatttctatctattagggtctcttgtatttagagtagagaggagctcagtcagaaaacattggtataaaggccgggcacaatggctcacgcctgtaatcccagcactttgggaggccgaggtggaccaatcatctcaggtcaggagtttgagaccagcctggccaacatggtgaaaccctgtcactagtaaaaatacaaaaattaggccaggcacgt

SEQ ID NO: 19 - DNA, 7515 bp, Homo sapiens
cgcaggagactcgcctgtcacctgctggagaaatcacagcatgcaaatcactttgtgccttctgcctttttattaggttaatacagacattggtaggttttatatttacagctaggcctggatgcctgcctgtgaccttttgaagggtacacactgtttgtttgttcatttgtttgtttttccaaaaaaacctctgtattacttttttttaaaagaagaaaaattgcgtgaaagggagatgcctctgaagcctctcagctcccctcacagtgccaccccagatagttggtgtgacttatctagccttttttttggctagtggggagcccctggtggcctgtgtctgagtgagccactgcataggcccctctagtcctgagtgctccactctctcccagtgacctcacggcagtaactagggagattttatcaactaacatctcagagcaaaaagggaaaattcctcacttttcttaggatatcgtgtgggcagaatagaaaggctgtctgtttctgagcttaatcggcgtacttgcaaaatgacttgtttttccgttgctcttatttgtattttaaactgtagcctcaattatgtaccctcttatgttgttagaattaggcatctggagtccagggaatgagtatagagatgtttcagttgttcgaaggggcacatgtaggtaaggtaagagcaccaagatgaggtgggggtggggggcagcaagaggaaacttgaatcagggctacgatagctgccttgctgactgttacaccaactcttgcacctcttaggagcattcactggaaaaattttccagatctcttgacgtcacagcgttgccatttgcctactgctgcttggatacagaatgcagcacttaacccttgtcctgcggggagggagtgattgagttgggtgctgtagttctggattacacaaccttttctttcttccttatctttacttctgtctttgcttttttccttgttatttgcttttgatagaggagaaaaaggattatgattaagcattttgctgtggttttgtgtgttttgcttgttttaacagctctgtagcctgatttcctttaactgtttagtgcctgataggaaagttgggcttttaaatgtatggacagggcaacaaggctaattcctgcagttgtgtacccactccctccctggccccctcctaccacatatacttcttttcaataatactgtttttcagtggcttttctccaagtaccctggcatttttaatgcatgagatctggacctttttagcagtaacctaaggctcctttgtgcagtcgtgcttctgactcgataaccttacagttcacttgttccctgttttgcattcacattgagtcgtttggctggcacaggactgccaggcaatgcctagtacagcctgttactatgcagctaatcagggagataatccttgtaaaccagtaactgatagccaccctcattcccatctatgtgttgagtctttttttttttttttttttgcttttgcagctatttcagcctccatcctgttgtcttgttaactatgggaaaaagaaaatgcagcccagcaagtcagtcattattcttgttccagttccagaagatggaattaaaatgtgctggtcattttcactatagaattttctttttttccccttgtcttgtcctccgaggggaaagagtgtgctttgttgataatacaaaccaaagggagagtgatagtaaaaaaaacaggaggatatcatcactgggtttctcaggattcattgctctgccatagcaaaataaccctcaggcatctgagcatttggagaaacagcagagcttggattgtagtatttaaatgtcaagggatatgcaagcaaagaaaacataggtctctaagggagtatactgtcatattttaaattcattgcataagcatccaaacatagctctagattttattggtgatcttcatgattttttttataattttgagaataaaaaatatggatactttttttaaaatttagggaataaaaaaatataaggatcctagttctagctgaacattcctcctacccttaaccacctcccatacacactgcaagtggagggctgcccagcttctcgattttcaccctgtgtcagtggggtgaggtgcactcttgacgttggacaaggaagaaatcatgggaccgggggaaccaggaaggaagcttgttcatccgtgggaagattaaactttcattctgagcatatgactgcatcacagctttttgtttctgttcttcttgcagttaagatccttctattctacgtaatattttatggctgcctggctggcatcttcatcggaaccatccaagtgatgctgctcaccatcagtgaatttaagcccacatatcaggaccgagtggccccgccaggtaaaatccacatgaatagcttcatttccttcagagatagcatgggtgtcactttttctattgagaaaaaattctttggaaaattactctataatgtagtcttaaagcaaccatgaaaagggaaaagagaaacttctctcggctgcagccagatgtcctacccgcattgcaggcagagctcccacgggttgcagacatcttatttgcccagttctagagtgagggtgaagcgtcctggttcttggccagcctgctacccaccagctatgtgactgtgaacagattgagttctgatgggggcctctgtcttctcatttttcatattctagggtttggttagtgggatcctttccagaccttttcaactctaacagacatttttttacttcttgaggggggctatgactcaggtaaattcttttaaaaaagtcacttgggctcctgttttaaaaggtgaacttatttttagagatgataagaagctgtggaatgggcagctactcacagggagaggagccatgactttaggggtctattgtcccacctgctgttaatttgcagtttgagcttgaacaaagtcactcttacttctcaatatttatacccattgatttaataagcatctcatttgccagctttctggtcccactttgtagtttaattaactgtctcttttagctcttaaaaacttgggtgaacaaaaagattatcataagaaatgcaaactgccacacgagtccctgctgtgacttgggtgccatcagtgtagagctatgtgtgtccacaccagtcgtgaaaggcccatggccatcatgcctgatgctgataggacaaggcagtggaatagccacaaacgtgaatttaccatctggctgttgtaaaaatcattgtctggaggacctagagagaaagtgttgcataacttccgggctctcacttacgaatgaccttgaagctgctgctgagggatggcaatgacttgtcccttctctgctttcccttggcaaaggtttagtaacagctgtatttaggtgacaatcttcagatgatctacgtggccctgagcagcctagatcaagggctactgcctgccacaggcttttcctgcgtacctccttgaatgtgggaaggattcacagaggaagatcttcaaaatacggaggtggcaagcattgttgtgtagccctaagtcaaatagttctccactgtaagaaaaactcaaaatatttccagataaatttagagctgagggattggggaagtggaaaaaaaaaatcacgtaagtaaataacataacttaaacctgcttaataatccagtttccagcaactgttttccacaagaggtgggtctgtggaaaggttgaagcaagaattctggagtatgcagagaagctgaaacatgttttacgttgggtatggtgatagggaagcattgtgtcttttcatgtcctcttctgctagaactttgtggtaccattagttgtaattttaattggtgcggatattttgtttttgttctttgttatgccatttaaaagttattcttccatcatgatgtgattttataattcttttttttttttgagacagagttttgctctgtcacctaggctggagtgcagtggcgcaatctcagctcactgcagtctccgcctctcaggttcaagcgattctcctgtctcagcctcccaaatagctgggattataggcatgcaccaccatgcctggctaatttttgtatttttagtagagacaaggtttcaccatgttggccaggctggtctcgaactcctggcctcaggtgatccacccacttcggcctcccaaagtgctgggaggtgtgagcatgagctaccatgcctggcctgctgctgttttataattcttatactcaaagccaaatacgactacaaagtcaaatattttcttcaggaaatttcctagattaaaaaaaaaaatggtccttgactatataaactttgaggagtcagcctttaatgaaactaaaaattctctttgtgccctttgcagaaaggaaaatttaactttggaaaagaaatagccaaagggcccaaccttgtaagtaaggacttggaaatgaccttgcctgtaaatcaactggctgaagtgctcagtcctttccaacaccctctcacggtgcctcccttcccttccttccatccccttcctaaaagacatgttcttagtacctatatttagtgtgctcacagcagttggactgacctgacaaaccctgacttctccaaaggaatgctggtggctcatcttggaaaaatgcattcctgtcctgtggtctgagtcacaggaaaagtcctcagtcctccatcttccttgttctttggcctggtaatttctgtctcttcttttcctcatcccttcccccatcacctttcaggagagtctaggccaggcccctcctcttcacctgccttaccctgtggggtttttcgggggcctttaccaagggacatgacattcatatgaaaatgacagtaaccttgatcaggccaggccagcagagtgccgaaccttgatcaggccaggccagcagagtgccggctgccacaaagtgcagctcttgggccaccccttatggccctgtgttgcctgaggaccctccttggcatttttcaatgccaaggaccctccttggcatttttcagagtacgtgttagaagtttgtattttgcataggaaataactccttaagtatgcagacaaacagtgtgtttaagaataccctgacaattttttggcttcacattagtatctttaaagcctccattttcatgtttagttaaagagggaaaattgtaaatttgagttagatacacctagtgggtgtgaaagtttgcatatgatttaaagatataaagacttactaataatattatcagctgaatttgaggcatgaatgcaaatccagcctgactgggtattgactgccctttgtacaccggaataccttgtagttggatctcttctcaataacgtgtgaatgtggccatatcaagcagtggcaattgtgcagtgagtgtatttgggcctgtatggcgataatattggataaactgagaggccaaacatgaaatctgagaggagagactaaactacagaatggaagtgaaatgtaagaaaaaatggtgaatgtgtacagcttcttggccctgaacaatggtggccgtttaatgcacatgatattccttacaaagtcgtgttgcagccggtgtggtagctcatgcctgtaatcccagcactttgagagactgaggcaggaggatcctttgaaggcaggggttcaagaccagcctgggcaacatagcaagaccccatatccacacacacacaaaaaatttttttaagtctcctgttaaaaaaaaaggggtggggccaggagtggtgactcacgtctgtaatcccagcacttccgaggcaggcggatcatgaggtcaggagatcgagaccattctggctaacacagtgaaactccgtctctactaaaaaatacaaaaaattagcctgtcgtagtggcgggcacctgtagtcccagctactcggaaggctgaggcaggagaatggcgtgaacccgggaggcggagcttgcagtgagccgaaattgtgccattgcactccagcctgggtgacagagcgaagactccatctcaaaaaaaaaaaaaagaaaaaaaaggggggtggggaatcatatgctctgtgagaactaaatgagatgataaacatatataaagcaaatagtactttatggtggcaaaaccaatggtattaagtgtagggtaactgttgagagcaacttctgtttttttctttttttcttttttttttttttcaagagggagtcttcttctgtcgcccaggctggagtgcagtggcatgatcttggctcactgcaacctctgccccctgggttcaagcgattctcctgcctcagcctcccgagtagctggggctacaggtgcgcgccaccatgcccagctaatttttgtatttttagtagagatggggtttcaccatattggtcaggttggtgtcaaactcctgacctctggtgatccacccgcctcagcctcccaaagtgctgggattacaggcgtgagccaccgcacctggtccagggtttttatagccctatctttctactagaagcagcagtttcttctttttggacactaaatttccagatatgacagggatgctttgcacacttagattttcatggagtcaataaaaccttagctttccatggaaatgtttaagagacatttgggaaacatgtttttaaaaattttaaagtgaatttaaatggcattgtatttgttgtgcagtctctccctttaacaaacccatgcttgttgggttagcgcctgccaagcttttctccagaggagacccccttaggcagtcctgcagtgctgctctgcagcatcgcttctcatctgttgatgcagttggatctggggagagacgcagcaattagctatgctggagagggctgagcaggcacaggcacgcacacccacgtgcatgcccacggacatgcaagcgtgcacacacacgcatgctcatggatatacacacacactcaggctaccaagccctggccctgatttgaccctgcttgccttgctgcctgcccagtggtgtaatggaaaagtctcttcttcacatccgccattgcccttcccccacctcaggctcacttagcaacagtggagtgaaatgaaggtcactgtgtgtcaatcggtgggtccgggagattcccagctggcttgcttcctggtaggcaggtatgaatgtatgctgctgttctctcttttaaggttgtgggtggctgtttgtttagctctgaagtatagacggctcagtgctagcagacacattttcaaagggtcatattcttggcttgttggtaatcagaatcgggcaggagaagtggggtggatgcagaccagctgaccacactggcaccaccagcagtttcagtttcatcttgattgtaaagaggaaatatctaatcttaaaactcattaggggcctggcgcagt

SEQ ID NO: 20 - DNA, 4052 bp, Homo sapiens
tatactggctaaacttagtttcacttttacaatggttatttcctttctagttctcaaaatattttgagccttgattgactgaaaatgagatccttttcattcagcataggcatgtagtgatttctcctaaagttttatccacaaaagtagacttttgattaacgatttttaaaatagtaaatttaatgctcctgtataatacctttaaactcactttataaatatagagagagtggaaaagtggaaatgacaaattactatgtgtctggagaaatcttaggtagcttcaagtactctccctggaaagtctagataccttcagagctgctgaaagctatagttatctactctacattttaaagatgacaatattatatgatgttaaatatatggcattcttgccaaaattctcaagtgcttcatgcttaaatgacattcctgaatcctagttattttagcaacactttcttcataacaagttcaaatgagatataagaaatcttagtagagaagttattcacctatgttgtaatttggcctttcactgttacaaccagcattcctaaatgtcttcaaggggctagagtcagagaaaacaggaaggaaatcacagttgggtgagaatgttccttggctacatgctaagtgattatgtgttgaggtcagagttgtaagatgtgactcccactgtgcattctgacgtgaaccacactatctcatttactgtcattcagctcatatacatatcagttacatttcgatatctttagatgaaaatctatggaatgggagtaggaaacattttaagtcaagggttacataaataattgttctaatttcttatttttggaactatatagagaaaaaaggtatttaaataggacaataatttagcagaaagggagttagaaaagatagaaggaggattcatcacagtatgaagatgggaaacagacaaatagagaaaaaattacatacatacatttgataaagaaagaagatacacagagttcaatgcacagcccccaacaatgccctagggagaaatcagatggaggcaaataggaaagagagatcttgggatcttaattagagacatgacagaggtttcaagttttactgtttctttttttttttttttgctaaataactttaaatctgtttgtgtttcacatatctagtcatagttgatgtggacaatggtaaaaagcttacaaaaactccaaaggggttgagatatctaggagaagtgtctggaactctagaaacagtaaccaacaatttgttaatttcacccatctgagccattttccttacttgcttttgctgtgcaagtatctcatcatattagtagaaacacaattcgctcaggaaggagatggaggcaaggaaatagagatggccaagttaactgagtgacttttcttgaggacgaggaccagatcagcagtagacaaaactgtatcaagagaaagctgagtgctaggctgcactaaccagctgagttgttttgagctggttcctcaaaatgtgagcttgtttccttatcaataaatgcaaataaaaccatggcttactggattggtttgaagattaaatgcagtagtatatgcccttccctaattgtaaagtggataaaataagcaaataaccactgttattattatttcattgtgctcaaagcttcataccaggcagcaggctctgatctttgaagaatttatataattgcagaagtaggacatacaaattgaatttaagtggtatcgaataaatgagaccatttgtgtattaaacactgcgctagtgttgggattcagaagtgaatatattacccatgctctcagggagtttacactgaagaattagtgtaaaccatgaatgcaacttgtaaaaatactaacaatgaagatgtaaaagactaaagaagagatctgagtattacagggtttattaggaaaatctcagcatgggtgggaagataaagcaagggttagtttagaagtcctattttggttatagctccaggattgcctagggatttgtgccaatcccattactttctcaagttggttgtatattttttaaaccattgccctttaaaagtctttgctttgaaatgtacttattttccctctacacgttttaaaaatttcattttaggatatttctgaaatcatttcctgctgacctgattttacattagacacctttgtgataaaaaaggtaatagcatatggaaacatacattctattccttcaccatctgagtgacagtgcgaagagggatcagactagagaatcatttgttttctatattaacagtatgtttttttttctttgtagtgtttcttacttccaatccaaacaatgtctatttcattattcctaaatgagttgttcttcctaacacattttccgttcatgatgtccttattagcccaccctcaattttcacttttccctgttttcaagttctgacaaagctttctgtaatatgttgtttgaattcatctactctgtttaactaatgttttgggatgttttaagggccttttgccaagtatcctctccacagactatacataatatagccaagtcaatagccatcaaagcacctttaaaataaattgggctatttccttatttaaaaactcaacatctgaactctttgctataatctgatttactcgccttccataaagtggggccctgtcattttctgttcccagaagtgtgggagaatgaaagggaaagaagagaggtgaggaacagggaatactgaggtggcacttactcatccctcaacagaattctgctctaagcctctgctgatgctggcttaattttaatatctattttttaattttttaaaataaaggaaattatccacgattattggaaaacaaaacataaggaaaaagtaaagtttaagacagccttttcatatatattttggacagagatcaagtcgagtgcctatcacaaagtgggtgcttagttaatgtttgtcaaataaatcaattaatgtgcagggctagaattaatatgggtcaaattgggctgcatgcaatggctcatgcctgtaatcccagcactttgggaggccgaggcgggtggattacttgaggtcgcagttcgagacaagcctgatcaacatggtgaatccccgtctctactaaaaatacaaaaaaaaattatccggtcgtggtggcgtacgcctgtaatcccagctacttgggaggctaaggcaggagaactgcttgaacctggaaggtggttgcatgagccaaggtggtgtcattgctttccagcctggacaacaagaacaaaactctgtctcagaaaaaaaaaaaaaaagaaaaagttgcgggggaggtcaaattgtaaggtctttttctacttacccatatttctcagatccctcttttcctctatcaccttgtttctcttttaatctgagtactcctaatactctccgcaccagtgtgtgtgtgttggtagcgatggggagtatatgtgtacttgaaaaattaattgctgaaaaaattccattttaaacttatttgttttgtaatatttgcaggaaacattttggatgtgataaaggtattatgaatttggcatatttaacaatggtgtgctaattctgtacatatgtttaattttcttgcttatcctttaggtgtaaatgtacaacaaataggcattaaacaatttaaaacatttggct[319 bp omitted]

SEQ ID NO: 21 - DNA, 45090 bp, Homo sapiens
caatattgctgtgtccctgggaatggggaggcccaaagaaagagagagatggggagcagctggtcagaggagcagtcagaacacgcatcagttcatttctctaccttgtagggtttgtactgctccaaaacaactgcaacagtaacatctaagatcactcatcacagatcaccataacacatataatcataatgaaaaagtttgaaatactgtgatggttaccaaaacgtgacccagagatatgaagtgagcatgtgctgttgaaaaaacagtgcctagagcgttgcttgaggcgggattgccacaaacctgccattcgtaaggacagtatatgcgaagctcagtaaagccaagtgcaatgacacgatctgtgcttgtaccacacagtgggtggcttgaaacaacagacatgtgttctctcacagtcctggaggttagaagtccaaaatccaggggtcagcagggccctgctctgtctgtgactctaggagaatccttctctgcctcttctgggctcctgcttgtggccagcaatctctgttactctggctggtagctgtgtcactccagtcctgcctgggttgccagatggagctctccctgtgtgcttctctgtttctctattatagggacactagtcatattggaatagaggcccatcctgctctggtgtgatctcaactttcatttatttatttatttgcttgtttcttttctttttttttttttgagacggaatttcattcctgttgcccaggctggagtgcaatggtgccatctcagctcactgcaacctccacctctcgagttcaagcgattctcctgcctcagcctctcaagtagctgggactataggggcacgctaccacacctggctaatttttatatttgagtagagatggggtttcgccatgttggccaggctggttttgaactcctgacctcaggtgatctgctcgcctcgccctcccaaagtgttgggattacaggtgtgaaccaccgtgcccggccagtttctttgtttttgagatagggtctcactctgtcacccaggctggagtgcagtggcacaatcatagctcattgcagcttcaaactcttggagtcaggcgatcctcctgccttggcctctccagtagctgggactatgggcataagccacaatgcccagataatttttttttttttttttttttttgtagaggtgtgtcttgctatgtcgcccaggttggtcttgaattcccgacttcaagcaattgtcctgcctctgcctcccaaaacactgggattacaggcatgagttgatttacatcttaattacatctgcaaagtctctatttccaaatactgtgtcagttacaggtatgaagacttagaatttcaacttgtctttttggagggcatgattcaacccacagcagatcacgaggggaaggggagtcagtgtgactctgcagaagatagtggtgtcagcccttgaggtcaggagtacacagggagccggctagggggaaatgatgggttccaggtggggcatgttgagtctgagctgccggtccatggagcttctagggacagaagtctaggaggtggtcagatgcatggtctagagttcaggggaaagtcaggctggaggtgtatgttccaagttctttgcatctgggtgggtggtagttaaaaatcaaaggtgagaagcagccagtgtagctggggagtgcaggaggtctcgaggagacagaaaaacatcccgggggctgggggcagcacctgtaatcccagtagtttgtgaggcggaggtgggaggatcgcttgagggcaggagtttgaaaccagcctggcaacatagcgagaccccgtctctacaaaaaaattttaaaaatagctgggcgtggtggcacataactgtggtcccacccacttgggaggttggggcaggaggatcgcttgagcccaggagtttcaggctgcagtgagccataattgcaccactgccctccagcccagggcacagagtgagactctgactcaaaaacaaaacaacagaaaacccataaaattgtcctggagggaatcgctaagaacacctggagaaaaactgaactctggccaccagggggcgctctgcaccagcccattggaacaatttccataggcagcaggtggataaacttgatcagtgaatttaagttttctctgtgctcttttcctgcagcaataggcttctatgtacaaaaagtacaattgcaggattgggttactgacttgagtgtatttacagagttatagaaaaaggctgctcaaatctctttgaggagaatcagtgatcttgagattagaatggttaagaaaagttggttgtggagttgggaagaggagatatatttaggctactccaggaagaaactcttagggggcgtatgagcagacagatgactgtttcacttctctggagaaatgtaagactctagatgcattttttggatttctaacaagatggtgaatgaacacagacaactgtcttcctccaacatttggagaagtcacagaaggaagaagtgttttatggatttcagagtctaatataaaaagaggagtcagaggagtcagagggtggttgggccccacaggggagggaaaggcagccacagagattagggtgggggccagggctattggcccccctacaggttagctaaaaaattactgtcacaaggctgattgagttatcggagaaaggcatacaaatttatttaatgtgtatacacgagagccttcagtatgaagatccagcttcccaataggtggcagaagctaatctgccatcttgaaattacagaaagaatccagactcagaatatgtccaaaataggttttagtggcaagacagtttatgggaagaagaaaggaagaggcttggctccaaaggtggccttgttatgtagatgaagtctccctcagagtgactagatagtaagtttcttttcaaaggtttaaaggtgtcagattctcaatcactcctagatctaaaaaaggcatagaaagggggacatgtggctatgttaatgaagattctctacagatgcaaattttccccacaaagacagctttgcaaggccaactctatttgctggctctgcagcagctatttcaagttatgccaaagaaatatattttggggtaaaatatttttattttcttcattaggttggggttgagatctttgctcatttcctttctcttcccatattgctttcagcatattgctcacctcctaggaactaccgcagggtagaaaacagcagggccagccatcccctcatgacaactagaatgacaactacaaggatgaagatggtggggccatgtcaacctgtgactcagcctgtgagccatcaacagagaataaaacccccaaccttattccctgttgatggctcggaactatggtggactgctgtgtgagagagaaataagcttctattgtgttaagtcacttaatacatgtttgagtctatctgttacacagctcagcctgtgctaaccaatgcaaaactctaagttgtaaatcaaaattaagaatttctatttaacgaagaacttacaggcagagttaacagattaaaaaatatatttttaacattaaaaacaaacaagggattaatagttattctaggtaagaaattcctttctaaatggcatttttttgtcagaaaaaaaagaattttacataaggttggaaagaaatccaactaaagcctcctagaaatccatttgagaagtgggcaaatgataagaattcattgaggcagaaatgcaaatggctaatgtgaacatgaagaactgctcaacatccctagtgatcacagaatttataacatgagtgagatactattcacaccaatcagatttggcagatttagaaaggtagataaagccaagtgttggtgaggatagaggaactggcaattgatatgtatccactgttgatgggaggatatcttgatgcagtgttcaggggagcaccctggtaggagttactggaattaagaatgggtagactgcatgcccatcaaccccactgtatctctacaagggagatccatgtaacaatgtcatcatggcattggtagttgaagtggggaggtagagagagccaaatccccctgttattagaaaggggtcctgatccagaccccaagagagggttgttggatcttgcacaagaaggaaatcaaggtgaatccatacagtaaaatgaaagcaagtttattaagaaagtaaagggataaagaatggctactccataggcagagcagccccaagggctgctggttaactatatttaatgttatcattctttcttgattatacgctaaacaaggggtggtttattcatgagttttcctggaaaggggtgggcagttcctgtaactgagggttccttccctttttagaccatatagggtaacttcttggtgttgccatggcatttgcaaacagtcatggcactgctgggactgtcttttgcgtgctcatgcattttaattagcatataatgagcaatgaggacaatcagaggtgaccttagtcgccatgttggttttgacaggatttggctggcttctttactgcaactgttttatcaacaaggtctttgcgacctgtatcgtgtgctgacctcccatctcatcctgtgacttagaatgccttaatttccctggaatgcagcccagtaagcttcagtcttatttacccagctcttattcaagatggagtagctctgtttcaaacagctctgacactcctgacacaggattaatatatagcacagaacaataaaccacgctaaacgacaagcagcattgagtgaaacagcacaacaaacagaaggagatacttacataaactgaagataaatgcatacacaaaacagcaacacacacacacacacacacacacacacacacacacacacacacacacacagaggaacatatatccaaagatacattaaacccatcaggatggatgcttctggtggtggggtctggagagtgggaggggagtgaagagaggccactgtcaggcctctgagcccaagctaagccatcatatcccctgtgacctgcacgtctacatccagatctcctaaagcaactgaagatccacaaaagaagtgaaaatagccttaactgatgacattccaccattgtgatttgtttcttccccaccctaactgatcaatatactttgtaatctcccccacccttaagaaggttctttgtaattctccccacccttgagaatgtactttgtgagatccatcccctgcccgcaaaacattgctcctaactccactgcctgtcccaaaacctataagaagtaatgataacccaccaccctttgctgactctcttttcggactcagccagcctgcacccaggtgaaataaacagccttgttgctcacacaaagcctgtttggtgatctcttcacacggactcgtgagacagctactatgttacgtcagaatgattgcaagctgagtgttaggattggcttaactttctgcacccaatatcctaagggaggaaaaaaccggaccctctaaggggaaatattatctgtagggcctgatcccatcattggacccttcacccaacgctgctgagtgagtagagggtttatttcatccttccaatttagtgattcagtagagatttcaagactcaaagcttaattaactccattttaattgaagtcatcttctcagtcatggtgtctgcacgcaggacaattcagcttggcctccaagtgcttcagtacaaggcccaatttctggctcagccattaaccagccccaagtcaggataatcagacaagtcttcaatttgtggggattttatggttggaatcagggtactttgacctctggaaggacagacctctgaggtgcaaggatgtttaatggttgcacagagaagacaatcctacagaaaaggcagtagttggggcagtgattaggactcattttggggtgagggtgacaagcacagcgatcaactagcctcacagtcagctgtctgcctttcccggatgggtaactgtcccttaatgggaacttcttgtcttccaaggaaggctaagataggcaacttgctacagtttgccttaacatcaaagcatgtcaaaaggagaacaatcccagtttaagaatcagcctgggagaaggcaaggaagaatttatagtttaggacaaattcaaggactgtaaatcatctaatgtgaatatagcacagggaggtagttggagacaagcttgtcaaataggctgaagccagattagacaggattttggactttttttctagtagtagagagccatgctactgaactctttctgagagagggatattagctcacatgctttggaaggacaactgaccactccaatcctggcttccctttgttgtcatggactacaggccagaattctatttgggagttgtggcagattgtattttccataaatagctgcaccaatgcttcctgtccatatgttcttctcattttgatattcctcctatcaagagttggggtctccattctctgtccttgaatctggacactcttatgactatggcagaactgatgctatgtgacttccaaggctaggtggtaaaaggtgatacagatacacccagctgccatgatgtgaggaagcccaagcaaacacgaggagaggccacatatagtttttccaactgatatctcaacaaggcctcagtcaacaggcatcatcagctgccagaaatgtgggtgaacaagccctcatatgattccagtccccttccactgggtcacccttaatcttcaagctgaagtctcagacgacatggagtagagacaagacagtcccactgtgccctgtccaaagtcctgccccacagagtatgggagcagaataaaatagttgttgtttaatgccactaaatttggagttgattgttatgcaggaatagatagcgagaagcctgggcatggtggctcacacctgtaatcccagcactttgggaggctgaggcaggaggatcccttgagctcaggagttcgagaccagcctgggcaacatggtgaaaccctgtctctatccaaaaatacagaaaaaatagccaggtgtggtagtgcacacctgtagtcccagctacttgggaggctgagctgggagcattgcttgagctggggaggttgaggtggcagtgagccaagattgcgtcaatgttctccaagctgtgtgacagagtgagactctgtctcaaaataaataaataaataaataaaaataaaaactaaaagaagagatagctagaacagaagcctattgcaataacaaaagtagacaaaaaaggcacagatagtcttgaggaaaagcaggatactgagaccttgttggagtaaatctgactaattggagatggggaaggggtttctaagatgaacaaatgactggcacaagtgatctgccattgattgaaataaaaaactggaaaggggagcagaaaagagagtccttttgcatttgaatatgttgattgtaaattggctggatatttctatgggcagatagggaggtttgggaaatgatggagtttggaggctcttcagcctctcagtgtctttagagccctggaaaagactagctcacccagaggaggagcatcaaagtttggaaaaagagaagagaattcagaagaggtctttggggagagtgaccacaccaacaactctatctattagagttggttttctttggttatccattcctgcaaaacaatcaactccaaatttcaataataataatttattttgctcccaggctctgtggggtaggactttgggcagggcacagtgagattggcttgtctctgctccatggtatctgagacttcagcctaaagactaagggtgacctaatggcagaggactggaatcatctgagggcttgtttacccacatgactggcagttgatgatacttgttgattgaaatctttttgagctatcagttggaaaaactatatgtggcctttcctcatgttcactcgggcttcctcacatcatggcagctgggtgccaggagcaagcattccaagtgaaccaggtagaactgtatcaccttttatcacctagccttggaagtcacatagcatcacttctgccatagtcataagagtctctagattcaaggagagagaatacagataccaactcttgataggaggaatgtcaaagtgagaagaacatatggatgggaaacattggtgcagctatttatggaaaatacaatctgccacaattcccaaatagaattccagcctgtagtctctgacagcaaagggaaaccagaattggagtggtcagttgtcctcctgaagtatatgagctaatgtccttctctcagaaagagttcagagttcagggagcagggagaagagaaggaggaaccagtaaaataatgagagtaggtcgatggaaaaccaagagagcatccacagtgtctatgatgcacagagagctggtgggggaaagtaggaagaagcagtagacaacagagcatcagtttggcttcaagttattcaacatcctctcagatttaaatcataaaaattgattgcttgctgggcatggtggcatgtgcctgtaatcccagttacttgggaggcttaggggagaggatggcttgatgccaggagttcaagaccagcctgggcaacctagcaagaccccgtccctaaaaagataataataaaataaatggatttctgccattatcattgtttagtaccagctgtatgctagagactgggctaagtgtgctacatgtgttattctgcatactctttattcttctaacatattttgcatattttatgttatcctcataacagccctgtgaggctgggggttctgactggtgaggaatccaaggtcccaaggttacataccaagttagtgctggagctgggatttgaacctggctctagttggcaccaaagctcttctatgtctctcttctcgtctacttatatttctctcttcttgctacagatatttacttctgtattcttctaagaggtttatggtttccccttataaatctagttctttcatctatttggagttaattcctgtgaatgatgtgagataggggtctagcttcattcttttgtttgtggacatccagttgtcccagcttcatttatttgtattaaggcttttaatcttctcatccacttccctccctccccactccagcccttggcaaccacgaatccgctttctgtctccatggatttttccattttggacattttatataaatgaaatcccacaatatgtgctcttttgtgactggcttctttcacttggcatgatgtttttgaggttcgttcaggttgttgcatgggtccgtactttattccttttcatggctgaataatattccattatgtggatagtctattatacattttgtttatccacttaactgttgatgggcatttgggttgtctccactttttggctattgtgagtggtggtgctgtgaacatttgtgtacaagttttggtgtgaacatctctttcaattttcttgggtacctaggagtgagattgctgggtcatatggtaaactctatggttaactgtttgagaactgccaagctgtttttccaaagcagctgcatcatttaacattccctcaagccatgtaggagggtttgaatttatctgcatccttgccaatgcatcttattgtctgtcttttttattagaatcatcctggtggatataaagtgtatcactgtggtttgatttgcatttccctaatgactaatgatgctgagcatcttttcatgtacttattggccatttgtatatattctttggaaaaatatctattcagatcttttgcttattttaaaattgggttaattgtctttttattgtcaagttgtaaaaattcattatataccagatgcaaacctcttatcagacatatgatttgcaattattttcttctattctgtgggtcatctttgcattttcttgatggtatcatttgaagcacaatattttaaaatttcagtaaagtccaatttgtctgttttttcatttgtcacttgtacttgtgtagacacatctaaggaggttttgcttaactcgaggtcatgaagatttgcttctgtatccttctaaaagttttatggcttccattcttaaattgagctctttcatccacttggagtcaatttctgtgaatggtgtgaggtaggatccaacttcattcttttgtttgtggacatccaattgtcccagtatcatttgtttgtattaatgcttttcatcttcatatccattttatgtagaggtgcattattatcccattatatagatgggtaaacagagatgcatagcagttaaacaacttctgcagtatcatcccagctggtcagtggcagagactggatttgagtcaggcagtttgtatctgagcctgtgttatatggcctcacaacatgcctccttatcttttgttaattttttttttttatgttttagttttagagacagggtcttgctctttcactcaggctggagtgcagtggcacaattatagcttactgtgcctcaaatccctgggctcaagcgatcctccagcctcagcctcctgagtagttgggactataagcacgtgtcacaacatctgggtaatttaaaatatttttttgtagaaatgagttcttggtatgttgcctgggatggtctcaaactgctgggctcaaataatcctcctaccctaacctcccaagtagctagggctacaggtgtgcaccaccacctccagctagttttttaattttttgtagagatagggtcttgctatgttgcccaggcctcaatcttgaattctggcctcaggtgagccttaccacttggccttccaaagtgctgggattacaggcatgagcctccacatctggcccaacatgcctttttgaatacaggtactggaggttgaaagtagagaaggtgatcttgtgccatcctgcattgctgtaggactgcagaagtgatggctacagcttcatcctttgagacctggagtgccaggacacccaggctccctgcagcaacagtgtgtgagaaatggccacagcctgacacccgaggccattggtgtaggaggcatgtccaccatgaaagtattgggctggtttctgctcacaagcagctctgcagcttgaggggtgaggggacaaagtggctgtattagggcctggggttgctttggaggcccagggccccatggaatatccccaaacatggggagaaaggagacactccccagaaacaaggtgcccagacagtgaggggagcaaatgaggagtggtgtcatttagagcaaaggaagagataaaataaatgcaccctgtgccttcatctgtttgtcagccctagcagaatcccttagactgggtagtttataaactatagatacttattgctcatggttctggaggctgggaagtccaagatcaagtccagatcatgcccaagatcaaggtgcttgcagattctgtgtctggtgagggcccactttgcagttctgagatgatgctttcttgctgtgtccttacatggtggaagggacacaagctccctcaggcctcttttacttttcaaaaatttttatttaggttggtgcaaatgtgattgcagtgtttgcaattacttttaatggcaaaaaccacaattacatgtgcagcaacctaataattttaatttttataggtacatagatggtgtatatatttatggcatacatgagatattttgattcaggcacacaatgtgaactaatcatatcagagtaaatggtgtatcccttacctcaagcatttagcattctttttgttacagatgtttgaattatattcatagttattctaaaatgtaaaataaattattgttgtctgtagtcaccctgttgtgctatcaaatactagatttttttttcttttttaagatggtatctctctctgttgaccagactggagtgcagtggcacgatttcagctcactgcaacctctgcatcctgggttcaagtgattctccttccttagcctccagagtagctgggattacagcgacccaccaccatggcctggctaatttttgtatttttagtagagacagggttttgccatgttgaccaggctgccaggctggtcttgatctcctgaccttaggagattcacctgccgcagcctcccaaactgctgggattacaggtatgagccactgtgcccggccaagatcttatttattctatctaaccatatttttataaccatttaccattcccctccggactacccttcccagcctctggtagccatcattctactctctatctccatgagttcaattgttctaatttttagcttccacaaataagtgagaacatgtgacatttgtctttctgtgcctggctcattttacttaacacaaagtcctcccgttccacccatgttgttgcaaatgacaggatctcattattttttgggctgaataatactccattgtgtttaagcaccacgttttctttatccattcgtctgttgatggacacttggattgcttccaaatctcggctactgtgaacagtgctgcaacagacatgggagtgcagatgtctctttcatatagtgatttcctctggtaggtatacacccaggagtgggattgctggatcacatggaggttctgttattttcagttttctgaggaacctccattctgttccccatcgtggttgtactaattcacattctcaccaacagtgtaccagggttccctcttctcctcatcctcgccagcattcattattgcctgcctttgggagcttgggtctcttttagaatggcactaatcccatgcacaagggttccactttcatcaactaatcatctcctaaagactcaatttttttttttttttttgagacagattctcactctgtaacccaggctggagtgcgatggtgcaatctcagctcactgcaacctctgcctcccgagttcaaacgattctcctgcctcagcctaccaagtagctgggatcacaggtgcgtgccaccacacccagctaatttttgtatttttagtggagacagggggtcaccatgttggccaggctggtcttgaacacctgacctcaggtgatctgcctgcctcgtcctcccaaagtgctgggattacatatgtgagccactgcacttggccaagactctacctctgatagggataaggtttgaacatacaaatctggggagatgcaaacatccaggccatgacaccctgtggttcaggagatggagacctgggcagtggccccagcagaggcacttggcttgaccctccctggctttgctgtccttattaggctgttacaaaactgtttccagggggcaggagaaggatgggttatgtgggtccacttcatgtgcacctgcttgggtgatgttttcctcccatcttttgtcatcaataaccagctggagtagagcgctgtgggctgcaagctgtcactggctgtgggctggaggctaacagaatgccatttcccggtgagcagacccctggtgtttggtgccccagggcagccagaggccagtgcacgaaggaaagggcaaggggtcctaggagcctcacccctcctggcaagggttcaatgctgtggcttccctagaatatctggccctggacacttgctccaccctttaccagctttgcaccccgctttgtgcctctgtttcgttacttcttctgcaaaatgggaaaaataattgtaaaaaataaaaatattgtaccatgtagtattgttgtttggattaaattaggtaatacacacaaagctctcgaaaaagtgctggacatggtgcacctgtgcaatacgtgttagctgttattgctgatataattttttttttttttttttgagacaggatctcactctgtcacccaggctggagcgcagtgatacaatctctgctcactgcaacctctgctccccttgaccccaggtctcaagtgatcctcccacctcagccttctgagtagctgggaccacaggcatgcgccaccatgcttggctaattgttttgtgtttttacaatacaaaaataaaatttagcgacaggttttgccatgttgaccatgctggtcttgaattcctgagctcaagtgatccgccctgcctcagcctcccaaagtgctgggattacagacacgagccactgcacccggccactgatataattcataataataggcttcttagcccaggcatgaaggggcttgaagatgaccagctcagcattcctgctggaaaattccaaactcttgctgcccgcctagtctcgggagcaccaagcaatctcatcttccacatgcagatggtttgctgttttccaaatttgtccacagatttcttcccctgtggagttctcagccctatttggcgtgggaatgtagttgcccagtggattttgcaggcaccaggccctgcacagtggctgcagggaatctaatgacctgaactctcaggtgtcctagcctggctcagtgagctgtctgctcttgcagtcccatatctgtggctttgacaggagaaacttatatgaagattcctcatccagtctcaagactggacctaaagtagtccaagagatctccaaaatacccctcccagctccttcccaggacccttggaggctctcacctggtgcatttcattttttttcttttttggagacaaagtttcactcttgcccaggctgtgtggtggtgtgatcttggctcactgcaacctctgcctcccggctccaagtgattcccctgcctcagcctcctgagtagctgggaccacagacacatgccaccacacacagctaatttttttttttttaatttttagtagagatgggctctcgccatgttcgccaggctggtcttgaactcctggccccaaatgatccacccacctcaacctcccaaagtgctgggattacaggtgtgagccaccacacctggcctgtactacatttcttctcatggccatttcaattaaaattgagcctttacaatttcccatctgtttcgggttgattttacgaaacacaccttattcgtttctagctttcttgcattgttgtcagagaaagaagcctgcaccattgttttttttttccctctctccaacttttattttaagttctggggttcacgtgcaggatgtgcaggtttgttacataggtaaacatgggccatggttgtttgctgcacagatcatctcaccaactaggaattcagctcagcatccattagctattcttcctgatgctctccctcctcccaccagcgccctccgacaggtcccagtgtgtgttgtaacctccctgtgtccgtgcattctcatcattcagctcccacttgtaagtgagaacatgtggtgtttggttttctgttcctgcattagtttgctgaggataacggcttccacctccttgtgttgagatgatcacagggaaatcatcctgccgtctaggccactcctcctccccagatgcttcccagtggtgcagtggcctcatcagccttctctagctccctcccctccatccatccaggaagtcacatagaaattgagaagcagggtcaggcatgggtgccgtggctcacgcctgtaatcccagcactttgggaggccaaggcgggcagaccacttaaggtcaggagttcaagaccagcctgttcaacatagtgaaaccccgtctctactaaaaatacaaaactcagccgggagtggtggcgggcgcctgtaatcccagctactcgggaggctgaggcaggagaaccgcttgaacttgggaggtggaggttgcagtgagccaagattgtgccactgcactgcagcctgggagacacagcaagacttcgtctcaaaaaaaaaaaaaaaaaaaaagaaaaagacattgagaagcaggatagcagtgaaggtggctgatgggaagtcaggaagactgagccttggcttggctaagcactttcggattggaaagctctagatgcaaatcccaggtctcacaccactcactgtgtgactctgggcaccccacaccacttctctgagcctgttttcccatctgtacaatgaaggtaatactgcatgccctagaggctcatgtaggtatacaatgacaagggctcagtgtctgacacatagcatgtgcccgggtactgcgagctgccaggtaataggatgctgttattagtttttttttaaaatgtaaaaaaacaccccaaaacactataacacctactgtgctcaatgagttaaacagaattatcgtgtgacccagcaatcactcctctgggtatagactttccctaaaattgaaagttggtaattgggctgggtgcagtggctcacgcttgtaatcccagcactttgggaggctgaggtggaaggattgcttcagcccaggagttcaagcacagcctgggcaacatagcgagaccccatttctgcaaacaattaaacaattagctaactgtcattgtgtctacctgtaatccctcctacaggtactgggagctcaggaggtcaaggctgccaggagctatgattgtgccactgcactccagcctgggcaacagagtgagaccctgtctcaaaaaagaaagagagagagagagagaggtgggggggagggagggagggagagagagagaggggtgggagagagagagaaagagagagaaagaaagaaagaaggaaggaaggaaggaaggaaagaaaggaaggaaggaagaaagaaagagaaaaagaaaaagaaaagagaaaattccaggccccgttctagagctatgattgtgtcactgtcctttaacctcggcaatagagagtgagaccctgtcaaagaaagaaggaaggaaggaagcaagggcggaaagaaggaaggagggaataaaagaaggaaggaaggaaagaaaggagggagggaggaagggagggaggaagggaggaagggagggagggagggaggaagggagggaggaagggagggagggaggaagggaagggagggagggtggaagggaaggaaggaagggagggagggaggaaggagggagggaggaagggagggagggaggaaggaaggaagggagggaggaagggagggagggagggagggagggagggaagaaggaaaaaaaatcctaggccccatttcagagctacagtatcagtacaactttacatttgacaactttacatctgaaaggcactaacctagaacaacttcactgaaaatctccctaaaatgcagtttctactagtgaatgcattgtggaatctcaactgtccccttcaagggtgaccgagggcagccgattttatgcaccttaaccccaatataaacctcagaaatgatacagtcccaggtctcccaggtttgtcttcccataaaagaaccctgattgggattggatgtcttggtttttttctacaataataataataatgtttagatatctaaatctccctttttacagctggaaaataaagttttgacccacacctgcggagtgttttgagatgatatagcaagaaatgttgcccaaaacaatgaaaactcaacctcaaatgattttatgtgtttaatttgtactacctcatttcccaccagtgttctcacatctgaaggctattttctgggctttgaaagatgaaaagtatggttaatgaacagcaaatgtagtcaagtgataccaatgacttctaaaatctctcagctgccagggcagtctggtttccaaagcacttccacatataaaatccccgggagtcagaggcagcctcaattagcacattcattttcacagacaagagtcttagcgtgtttcagattttgagagagattatatagaggacacaaagctggcaagtgtcaaaagtcgttgggagcccagagctgtctgacaccaaattggattaaaaaacatgtatcacttttggaggtcaaggtgagaggatcacttgagcccaggaattgaaggttacagggagctatgtctgcaccattgtactccagcctgggtgacagagtgagacgctgtctcaaaaaaaaaaaaaaaaaaaaaaaaagggccaggcaaggtgactcacgcctgtaatctcagcactttgggagcctaggtaggcagatcactggaggccagaagttcgagaccagcctgggcaacatggtaaaaccccatctctactaaaaaaacaaaaattagccaggtgtggtggcgggcacctgtaatcccagatactcgggaggctgaggcatgagaatcgcttgtacctggaagtagaggctgcagtgagctgagattgtgccactgcactccagcctgggagaagagagagactctgtctcaaacaaaacaaaacaaatccaaaaaacaaaaaaccaaacaaccaaaccacaccccaggtgtttgaaacaaacaaacaaaaaaaacaagtagaaacaacccagtcatccatcagtgaatgagtggataaacaaaatgtaatacatccatacaatggaatagtatttattcttaaaggggaacaaagttctgagccatgcttcaactcagaatgaacctcagaaacatactcagtggaagatgccacacacaaaagccacatatattacaggattccttttcttactatgaaatgtccagaataggcaaatccatggagacagaaagtggattcatggttggcaagggttgggggagagggcgtggcgagtgtccacttatgggaaggggctttcctctggggttaatggaaatgttctagaactagagagtggtgattcatagtgcacgacactgtgaatatgctcaatgtcagtaatgacatattttatgagtattttaatataatttaaatttttattttttatagagatggggtcttgctatattgtcctgtccagtcttgtctggaactcctggcctcaagcaattctcctgcctcaaacttcccaaagtgctgggtttaaggtgtaaggcatcatgcccagcctaccataattaaaaaaagaaaaagaaatgagaaacaaaaagtgtggggtcagaaggggtctcatcccccatgctgatctgggctctggctttgttgtagccctggcctcccctgtatgggacgaaggcctctcctcagcatctcagttactgggtggggggatctgagtgtgatattgaggaaagaccagatgagacacctcctaggctgagggttcctgccaccatcccagtgctcccagcacagagccttttctttgcattttcaggccctcccctttgaaatgacaggagctctgatacatgaggaagctggaagcctggacttcacacgaggctgccgagggtggtggtcagacggctggaggtggtgtctggaaggtggactgactcctggatgcagctcaaaactgcattttaaattatttgtttatttatttatttaagacaggatctcactctgttactcaagctggagtatagtggtgtgattgtagctcaccgcagcctcgaactcctggcctcaagggatcctcatgccccagcctcccaaagtgctgggatcacaggtatgagccaccacgcccagccaaattttattctttattcaaattttgttcaaattttattcttaattctgatttatttttgttcattgttttcctcttggtcttctgtgtgtagaagatccattgttgggacaatcacagccaaaattaccccttggacttgtgtccctggtttgaagagaacgtccttcatttgctaattcgttcaccttgtacctctcatggggggcacctgccaggctctggggctgcaaggcagagacaaactacacttagctcctgccctcagggcatacagtcttgtaaataaagttttcagtggaactaataataatgatgctattgcttgacatcttctatgtacctggcattgtggtaagcactttatgttcatcaatttttttatgttaattaatttaatcgttgaacagccatctcaagtatgtactatttttaatccccattttacagatggggaaactgaggaccagagtgttgcagtaatgttctcgagtttataccacaggtcgtaagtggcagagctggactttgtagaactggaatgcaggaccttttcttttttcttttttcttttttttttttctatttttgagacggagtcttgctctgtcacctaggctggagtgcagtggcgcaatcttggcttactgctgcctctgcctcccgggttaagtgattctcctgcctcagcttcctgagcagcagggattacaggcacccaccaccacacaaggtaatttctgtatttttagtagagaagagggttttgccctattggccaggctggtcttgaactcctgacctcaggtgatctacctgcctcggcctcccaaaatgccgagattacaggagtgagccaccatgccgggccagaatccaggatcttaatcgctgcgttagaccaccccacaaagggacatttctagctctctgcagtgagcactggacctaacagcgcatcaaggtatcagcgcatcaagacgtaggtttcttcctataatacgtgaggacattagctgacattcctacaagagcaggtccaccatactcctgtctggtgttcaccacgttcccaaaaggctttctctctctctctgtatttttttttttttttgacacggagtctcgctctgtcgcccaggctggagcgcagtggcaccatctcggctcactgtaagctctgcctcccgggttcacgccattctcctgcctcagcatccggagtagctgggaccacacgcgcccgccaccacgcccggctaattttttgtatttttagtagagatggggtctcaccatgttagccaggatggtctcgatctcctgacattgtgatccacctgcctcggcctcccaaagtgctgggattacaggtgtgagccaccgcgcccggcctctgtctcttttttaactacagagtttctttttttttttttaaacatttattttaagttcaggggtacaagtgcaggtttgttatgttggtaaactcctatcacaggggtgtgttgtacagattacttcatcacccaggtattaagcctagtacccattagttattttttctgacactctcctcccaccctccaccctttgacagaccccagtgtatgttgttcccctctatgtgtctgcgtgttctcatcatttagctcccacttataagtgagaatatatggtatttggttttctgtttctgtgttagtttgctaaggataatggcctccagctccatccatgtccctgcaaatgacatgatctcattcttttttatggctgcatagtattccatggtgtatatgtaccacattttcttcatccagtctaccattgatgggcatttaggttgattccttgtgtttgctattgtgaaagcaaaaactgacaaatgggatctaattaaactaaagagcttctgcacaggaaaagaaactatcaacaagagtaaatagataacctacagaatgggagaaaatttttgcaaactatgcatctgacaaaggtctaacgtccaggaacttaaacaaatttataagcaaaacacaaaggactccataaaaaagctggcaaaggacatgaacagaaacttttccaaaggatacttacatggagccaacaatcatatgaaaataagctcaacatcaatgagcattagagaaatgcaaattaaaaccaccacggatacgatctcacaccagtcagaatggctgttattaaaacgtcaaaaaataacaaatactggcaaggttgtgaagtagaagggacatttatactccattggtgaaagtatgaattagttcgacgattgtggaagacagtgtggagattcctcaaagacctaaagacagaaatactatttgatccagcagtcccattattgggtatatacccaaatgaatataaatcattctattataaagacacatgcacatgtatgggggttttcttttttttctattttcattatttatttgtgccaacttttttttttgttcctatttttataattatctccaggggggtgaagacttgtagaagagtttctgagaagaaaccacatgactacttcatactgacacaccttccagcgacttcagctttgtcttcatgtaatcttgtcatcttggaagatgagtattgattggatatatctggcaaagaattctgaaaacgtttctgggcagggtgtcttggctgattacaaaatcatctcatcccaaatcccttcatgcttctagccttggggagaccactgtaccttctgcattagaagctggacatgttggggtccatatttggaatttggatcccgtgataataatagtgactgttacgcactcttgggaattcagtaatgatgccttttttttttccttttttttcttaaagacaggttcttgccctattgcccaggctggagtgcagtggcacaatcacagttcaccgcagcctccaactcctgggctcaagtgatcctcttacctcagcctcccgagtacctaggactacaggtgggtgccaccatgcccagccaatttgtttttagtttttgtagagacggggtctcgctatgttgctcaggctggtctcaaactcttggcttcaaacaatctttttgctttagcctcccaaggtgacccacttttttttttttaaatctaatttggtgtcagacagctcttggctcccaactagttttgacacttgccagctttgtgtcctttatataatctctctaaaaatctgaaacactctaaaactcttgtctgtgaaaatgcatgtgctaattgaggctacctctgactcttagggattttataaatgcaactgctttggaaaccagactgctggaggctgagagattttagaagtcgttgctggtatcacacgactgtgtctgctattcattaaccatatttttcacctttcaaagcccagaaactagccttgagatgtgagaacactggtaggaaatgagaaaatacaaactaaaaacataaaatcattttgggttgaattttcattgtttggggcaatatttcttgctgtgtcatcttaaaatactccacaagtatgggtcaaattggttttttttcttcagttctaaaaagggagatttagatgatatctaaatttattatttttgtaaaataaaaaagccacccaaccccagcgttcttttgtgagaagacagaattaggacatataaaactatatatttctgaggtttatattggaggtaagatgcacaaaatttgctgccccgggtcatccatgaaggggacagatgatattccatgacggattcactagtagaaactgcattttggggagctttttcagtgaagctgctctaggttagtgcctttcagacgtaatgttgtcaaatataaagttgtgcatgaatcacctggagatcttactgaaaggcagattctgatcctgtattgagacagcatctctctctttcaccaaggctggagtgcagtggtgcaatcatggctcactacaacctcgagctcctggtctcaagctatcctccagcctctgccccgctgaataactgggactgcggtcatgcaccaccaaacctggctaatttttaaattttttgtagagacaaggtcttgctatgttgcccaggctggtcttgaactcctggcctcaatcgatgctcgcaccgaaatctcccaaagagctgggactacaggtgtgagccaccacactggattctgcatttctaataaactccccagtgatgctgaggctgcaggttctcagcccagattttgagtagcaagatgatagaattgcttgtactgaacaattacaggtggtgttccatattgtgaaaattgtgttgagcacatgctgaggttgggattggccaaaatgttaaagaaagcagttactcctattgaattgtctttaagagataccttcagggaagacccaaagtaaagtagaaaatcctgttggaaacaaggtgggcttgtcaactgatgtctgtctgtccaagtgtgcatggctgaaaaaatctaatcctgctgtattagtccattttcatgctgctgataaagacatacccgagactgggaagaaaaagaagtttaatggactcacagttccacatggctggggaggcttcacaatcatggcagaagacaaggagaaagtcatgtcttacatggatggcggccggcaaagagagagagagcttgtgcaggggaactcctcttcataaaaccgtcagctctcatgagacttattcactatcaagagaacagcacaggaaagacctgtcttccatgattcaattacctcccactaggtccctcccacaacacatgagaattgtgggagctacaattgaagatgagatttgggtgggaacacagccaaaccatgtcacctgcctaggaattgggcatacaggtagggatcccagtgtcggaggcatttaacaagaggaactccatcttgaataggggctgtgtaaaataaggctgagacctactgggctgcattcccaggaggtgaaggcatttaaggcattcttagtcaaaggatgagataggaggccagcacaaaatacaggtagtaaagaccttgctgataaaacaagatgtggtaaagaagccagccaaaacccagcaaaaccaagatggtgatgagagtgacctctgatggtcctcactgctcattatatgctaattataataaattagcatgctaaagacactcccctcagcaccatgacagtttacaggtgccatggccacattaggaagttaccctatatggtctaaaaaggggaagaaccctcagttctgggaattgctcaccctttcctggaaaactcatgaataatccacctccttgtttagcatataatcaagaaataaccataaaaattggccaccaggggcccatgccactgctctgcctatggcatagccattttttatttatttgctaataaacttgcttttactttatggatttgcctcaaattctttcttgtgcaagatccaagaatcctctcttggggtctggattgggacccctttccagaaacaccaacaatacatggggtggctggcctcgttaggaagggcatgtccccaacatcacactcagatccccctcccgcacccaacaactgtctccccgatgtgactttgtgttgttctctcacccccacctccagcccaccccatccctgaaccaagactgtcctttcatgctttgccttcaacatccaattacagaatcattgatcctgcactggctgtcctctatctcaagccatccatcacttaggcatttgtcagggacagaagatgggcctggctggatgctggacccgccgatgttattggaaaactatgcttgctgatttaaaacaaaattctgtttgtgctttttaattgcatctagcccaaatgttgctgagatggattccctggtctcttttaacaaataagtaagcattaattgattaattcattctacaagtatttgtggagtctctgctaggtgctagggactttaccaggtgctggaaacagagcagggaatgcagtgcctatacctctgaagactgtcatgtaatgtgacaagcagatgataaacaaacatttgcacaaagaagtatgtaattgtaatgatgctaagtgctatgaaggaagaggacagaaggtctgacagaggggcagagcaaggcctgatgagggagaccacaggataaagcaacattaagcttggcttatggggtgcggcggagggtgtcaaccttaaataacaaggttcaggctgggcacagtggcttatgcctgtaatcccagcactttgggaggccaaggcaggaggattgcttgggcacaggagcttgagaccagcctgggcaacatggtgagaccctgtctctacaaaaaataataataataaaaaaatagcagggcatgatggcatgcatctgtggtcccagctacttgggaggatgatgtggcaggatcgctggaacccaggagactgaggctgcagtgagctatgattgcaccactgcactccagcctgagtgacaaagcaagaccctgtctcattggaaaaaaaaaaaaagttgaaaaaaatatgattaagtgtcaagcttgaggatggccaccccagaaactgtgactccaaacgaatggagttagcatttccaaagtagagaggtggtggtttcaatgatataggcagagactgggatgtttcagcaggattacaacattttccacagaagaccaggcacatacaccatagcgatttgatcagttaaaggtggctaaatgccaaggaagattactactgggaggcagggcagtgatctgaacgggggaggtcccatctctggcggctcttcgtcttcttaatggtttacaggaaaaaaggaggcaggacttgcagctgcatgccacgtgactcaggctgcagagccacactcctttcaaggctcaggataatttaaagttgtaacagctttaagtttgaattattattattttgagacaggatctcactctgtcgcccaggctggagtgcagttgtgccatcatggctcactgcagccttgacctcctgggctcaagcgatcttcccacctcagcctcccacctaagcctcctgtgtagctgagaccacagatggtacatgccaccacacctggctaatttaaaaaaatttttttttttttttgtagagatgggatctcactatgttgcccaggcaggtctggaactgctgggctcaagtgatgctctcacatcagcttcccagagcactgggatcacaggcatgagtcactatgcccagccccaagtttgaattatttaattttacaggggttagttagggagttcgagccctacctttattccttcagccactgttgtacactgtgtccctccaaaattcatctgctgaagtcctaacttcagtgggtctacttgtggaatagggcttttaaagacaaaattaaggttgaatggggtcataagggtgggtcttaatccaatagaactagtatctttataagaagaaaaaaacttgagaacagacattcctgtgcacaaaggaaaggccatgtgaggacagagcaagaaggcggctgtctgcaagccaaggagagaggccttagcaggaaccaaccctgccaacaccttgatcttggacttccagactccagaactgggagaatataaatttctgttgtttaagccatccggtctgtgctattatcttacggcaactagaacagactaatacagttcttcagagccaacaggactctcagcttgaggggcaccaagaacacatgtttgggacagacgtgctcttgcacaatggcaatggctccactaaatatcagtagaggtcacttatcccaccagtttagaggccacagttctcaacactgcactaaatcactgtacgaacttatttttaaaattttttaatatttatttatttattttgagacagggtctcactctgttccccaggctggagtacaatggtgagattgtggctcattgcaacctctgcctcccaagttcaaatgattctcctgccttggcctccagagtagcagagattacaggcagccaccactatgcctggctaattgtatgaacttagaaaagtaacttaaacttcttagaaaccaagaactaaagaagttgcaggctgagtgtggtggctcatgcctgtaatttcagcacttcaagaggccgaggtgggtgggccacttgaggtctggagttcgagagcagcctggccaacatggtgaaaccctgtcttgaccaaaaatacaaaaagtagctaggtgtggtgatgtatgcctgtaatcccagctattcgggaggctgaggcaaaataatcgcttgaacctgggaggtggaggttgcagatagccatgattacataatcactgcactccagcctgggtgacaaagtgagactatatctaaaaaaaaaaaaaaaaaaaggaagttgcaaggatagggtcagaggtacggttgaaaaaaaaataacagaggtcatctgcaccctgaaacagtggttctcattcttccaagccctgtcacctggaagacttgttaaacgcacatcactgggccctacctccagagtttctgattgagtagatctgagttggggcctgaaaatgagcatttcttttttttcaaaaagaacgtattttttatagattcagggagtacatgtgtaggcttgttcacatgcacatattgcatgggggtggtgtttgggcttctggtgaacccatcatccgaatagtgcacactgtcctcagtaagtaatttttcttccctctcctccctcccagtctcctcccctttggagtctccaacatgtgttattccccccctgtatgtccatgtgtattcattatttagctcccacttataagtgagaacatacagtatttgcttttctgtttctgagttatttcacttagaataatgcccttcagctccatccatgtagctgcaaatgacaggatttcattcttttttatggctgcatagtattccatggcatatgtgtaccacattttctttgcagaacccaccaccgatggacatttaggttgattccaggactttgctattgtgaatagcacggtgataaacatgagtgcaagtgtctttttgtgaaaacaggcatttctaacaagtttccaggtgatgctgaggtcacaggtcctggggccacactttcagaaccaccatgtggccttgggtccatagtcatttgaaacttccattaagatggccccaggcccagaatgggggagggaaaaatggagagcttatgctgcagagcaacatgacagagacagccctgagccatggagaatggaatgactcagttatcctggcaaattcagataaggctgcacagggagggcatatacttgacctcctgcaactgtccaaggttcattgcctgatgcacagcaagtcaatatactgagacactgaattgcagcagagaaagacgtttgatcgtaaggcagacaaacgaggaaacaggagcaagcctcaaatctgtatccttgaggagttctagctagggatttcaaagggcttgatgaagtaatgggctgaggtgtggggattgttgataggttggggagtgtatggtggaggagtacatggacagggagatgaagaagctgtattctcatgcagattctgttcctctgtgggggtttttgaactggctggcatcagccatgctgctggaattcaggatctgaaaaacatcttaagcaatccttaaagaaaagcattctgattataacatcagagatcaatggaacaatggggatgtaaatggtcagtatccagtactaggtgatttttggttagcaagcagctacaaaaaaagtgggccaaaggacaacctaattaatgcttaattattattatatttctttccagaacttggcatgactttcttgttaaccccgagaagatgattttactctcttttctggggaggatggggtgagagggcagtcatctcaggactgtttacaagactgggggaacctgaatctcccccatcctactccattgtggggtcttctcagaagactatttgctgctggggcagagaggaaggagctggagagagggaaggcagagctgaggaagagaggtgaccaggtgggtgctacctgcattcccctcttgggcttggcccggagtttatgttgtgtagaaaggacattgcagaaggttttattgtgttgtcagaggcatttgaatcagcaactccatcttgaataggggccgggtgaaataaggctaagacttgctgggctgtattcccagtaaataaaggtattctaagatacaaggtgagataggaggttggcacaagatacagatcataaagaccttgctgctaaaacaggctacagtaaagaagccggctaaaacccaccaaaaccaagatggcaacgagagtgacctctggttgtcctcactgctacactcccaccagcgccatgacagtttacaaatgccatggcaacgtcaggaaggtaccccatatggcctcaaaaggggaggcatgaataacagcatataatcttgtttatgtttagcatataatcaagaaataaaaatgggcatctgcctttggaataactattctttattcctttactttcttaataaacttgctttcactctgctctgtggactttccctgaattctttcttgtgcaatatctaagaaccatctcttggggtctggattgggacccctttctggtaacagtgtgaacctcaaatgtctgagccaggtctcagtcaatttaggaagtttattttgccaaagtgaaggacatgtgtccatgacacaacctcaggaggtcctgatgacatgtgcccaaggtggtcagggcacagcttgtttttacatgttttagagagacatgagccctcaatcaatatatataagatatacattggttctatgtggaaaggtgggataaatcgaagctaggagggggcttccaggtcatagggtaggttagagacaaacgtttgcattcttttgagtctctgattagcctttccaaaggaggcaagcagatatgcatttacctcagtgagcagaggaatgattttgagttctgtctatcctttttccacaaggaaattccttgtgagggaggtatgtagctttaaaaaaaaattttagtagctacctttattaggactagaatgggaagcaggtttgccctaagcagttcctagccttgacttttcttttcggcttagtgattttggggtcccaagatttattttcctttcaccattggtaactagtctcccccatatactactaccactggctcagtctgtctctgctgcttaacaaaatatctgagactgggtaatttacaaggactagaaaattgatttctcagtgatggtggaaaaatttaaattttgccagaatatgtttaaggtgatttattctgagccaatgcgagtgactgcagcctgggttacacaacctcaagaggtcctgagaaagtgtgtctgaggctgttgacactgaagattacagtttggttttataaactttaggcagacagcaattgcaggtaaaaatcataaatctattgaagaaagtatacactcgtttagcctgaaaaagcaggacatcttgaaggtgggtcttacaagtcaaaggtgtgttttagaaattctttttttttaacttttcatttatttattatttatatgtttttcatgtagttaatagagacagggtctcactatgttgcccaggctagtctcaaactcctgggctcaaacaatcccctggcctcagcctcccaaagtgctaggattgcagccaggaggcactggggcctgccaggaaatctttagttgacaattggttgagagagttaagctattgtctgaagtcttgaaatcagtagaaaggaatgcgtgagttaagataagggggttgtgaagatcaaggttcttattttgcagatgaagcctcatagatagcagccttcagataaatctcagggatggtaaatgtcagttttcagacattaaaggtttcaggctctcaggtaatctctcctagatctgggagcatcttgggaggggagagacccagctatattaatggagattctctaaagatgcaaatttctctcacaaaagatggctttccacggctgtttcaatctgttggctctgtggaagccatttcaaaatatgtcaaagaaatatattttggggtaaaatctttagatttttcttaaaggtctgctgtcatgttgtgttttactagagtcaggttggaaagtaagccactcacatagggttaatggaaacctgtctgatgagattttatggtgtgccaggcatgattccccagtccccttacataggaatctgggcaagagagaaaagatcaacatttagtcctcatcacagtttggaggctgcagtccaagatcaagatcaaggtgctggcaggactggtgtctgaggaggacctattgtctgttttcaagacagcaccttgtgctgcatcctctggaaacaaatgctgtgtcctcacatggggagggatgcaagggcaaaaaggaatgaacggctcccttctacctctcttataagatagtaaatcccatttgtgaaggtggagccctcatgctgaatcatctcctaaaggccccacctcttaatactatcacactgggcttaggttccaaagtatgaattttggggggacacatacattcaaaccacaacaactaccaaagtgccagctgtggggagaggtgaacacagggatgagaagctggaggtgactctggggtgacagacagaggctgagagagagaatagagagagaggggagagaaagagaggaggaggaggaggaggagagaagtgggggaagggaggaaaggagagagaaagagggaggagaaagaaagggggatggaaggagagaaggagggagagaagaagggagtgaggaaaagagagggagggaaggagaaagagaagaaggtagagggaaggagggggtggggaagagagagagaaggagggtggagggaggaagagagggaatgagagggagggtggagggacagattgggaaaggaaaagggagggatagagagatggggaaaggagagagaaggaggaggaaagagaaaaagagagaggaaggggagggagagagagaaagagagaggaaggggaaggaagggaaagagagaaggagggagagagaagggggtgagggagacagggagaagaagggagggagagacaggaaaagggagaatgagagggggtgagggaaggagagaaggagagaaagagagggaggaggaaaagagagagagaggaaaaggagggaaagagagggagaaagagggaggaggaaaagagagagagggagaggaaaaggagggaaagagagggagaaagagggaggaggaaaagagagagagggagaggaaaaggaggggaagagagggagaaagaaagagagaaggaggaggatagagatagagagaggaagggggagggggaagagatgaagagtggggagaagggagaaagggagggaggagagagggagggagagagagaaaaaggatcctcagcaaggtggggacacagaggctccttgggcacagttctctgcatagccagtgtcttaatcccttttgtgctgctataacaataccacaagctaggtaatttataaaaaaatgaaagtttatttggatcatggttctggaggttgggaagtccaagactgaggggctgcacctggtgagggatttcttgctacatcataacatggaggaaagcatccacagtgaaagagaatgcacgtgcaagatggaaggctacactggcttttataacaaatcccctcttgtgataacaagcccactcccatgataacaacattaacccatttatgaaggctctgcctcttaacagtctcacctcttgatactgttgtgttggggattaagttcctaacatacgaactttggaggacaggttcaaaccatagcagccagagagccagtaaggggagtggtgacattcaaattagaggacagggtgtctgtcctccttcccatgcctcccctgacagcaggcagcaagagcaatggagcagagagaatggtgggggacaagacacatagttgctagatccggagctggagatgggaagcacagttcaggcttttgcatagaatatgaaattgcaatcctaaaatgaacaagaccaagtcttataaactgaaatgaagctctttcagtaacccaaataacttataggatcaagctgtcactaagggactgtggcatataaagggagtcacctgagcacagttattaggaaatgaaacctacctaacctgcccccatccaacctcaattcccctaactataaaagagtggagacttcttactgcacttcccccactcacattgaccacattacctggggtcttgtttctgttgaaccacccaaggtggggactcagctcctctgaagcagatgcacgtgcaggttgaaagattccctagtcctgctcactgcattgttaatcctttaatattcttccgtcactggacaatcctgggctgtcctgaccatggaattccactcttctagaatccggtccactttttaaaatcccttaacattaaaatcagttatgcagtctacctactattaaatgcaagaacttgtgttttcctgagaaaatgaaatttgcagtatccatgggaacgattatcatcaaatacttaaatggctttacaaaaagaaaatgtcaccaaacatgtacatagaagcaagcacagtattaaattagctaacaagtgggctttggcttcaagtagatccaacaagacattcactcagcagtaacactatctagatggctttactaatcagaagttttatttcagtcctcaactgttttctgggcaaggccgaaatgatataaaagcacattcacatgaaagtttattccataaagcaattattaggagctatcttggtgtgcaaccaaatttatttcttgttttacacttgtaaataaaattactgggggacaattattatggtgtggaaagaacagtctccttgggtggagacctgagctctggtcttcattctgaattgagacatgattgtggccaatgtctacctaacccacccccatccaacttcaattcccctaactataaaataaggggaatggagcaggtggtctttaaggcatcttttcatacaacattctataattttaagatgccaggtacaaggttaaaaatgataaataacctcttggagaattggcttattctaggaccacgcatgaaacataaaagttgagtctggggcatcttatagtatcagaaagtaagtgatagtgacaggaggcagccaaatgcctaggcaaacaggggtgggtccccagtgaaaccccaaattcaagccaaaaacagcctgaaggctgaaatactgggctgctagtcctggatgaaatccaaaacccagagtgaaaacttcttttcctgtttgcctgcatctcccctattctgagcccataaaaagccctagggctcagccacatggaagggactttcctgtctttgggtaggggaaccaccactgtgtcccctctctgctgaaagctgttttcatcactcaataaaactcactgccttgttcactcttcaattgtcagcacatcctcatttttcttgggcatgggacaagcactcggggagtggtacacaaaccagactaagccaggatgggccaagtagggtggccatctcctgcagcagatagcatggccgagtgaggcccaagccaggtgtcaccggctggaagtccccagcttgcaaaattactgagaagaaaatcctgcatcataaggaagtactaaaaccaaacaaacacaaaatccataataatggggtttgtcaaaggaacacaagagctgctgaaagaactcccaatcaatatctcagaacttagaaatgtaccttacctattcaatttccccttccctccagctcctgacagccatcataatttggagatgattttgcccagttttaaagacacgcacaaaatcattcatttttatgcctgataaatctctattttccctgaggacacgaatgctacttgctctcattccaaccccctaaagctgaaacagtgcttcactcagccaacgttaagggcttgatgcattctggttccagtctggggaggtgggaggatggagagaagaataaaactctgagaaaggaagaaaaaagctgcagagattgagataatgggctggagttagagatgaccactgctacaattgaggcatttattggaggttggtttagtagtcaatgttttggtcagcacctccacaatttttttttttattttttaagagaaagggtctcactctgtaacaatcatagctccctgcagctttgaacttctggattcaagtgatcctcccactttgaaactgccattgcaaaattatgactgagataatgaaagagatgtaacctaactgactccattttgcttctaacctccaagctgtccttgttcattcttgagcgtaagctgaactacctttgggaggaacttatagtttatagtttaaaacaaagatgataacagccctttcccaaaacaaacctccttcttgcctggggactagactgcccttataggactaagaaattagccacaagattagaaattatggtttgggtctgggcatggtggcttatgcctataatcccagcactgtgggaggccaaggaaggtggatcacttgaggtcaggagatagagaccagcctggccaacgtggtgaaaccttgtctctactaaaaatacacaaattaaccaggtgtggtggtgtgtgcctgtaatctcagctactcaggcggctgaggcaggataatcgctttaacccaggaggcggaggttgcagtgagccaagatcgcaccactgcactccagcctgggtgacacagagactcggtttcaaaaaaaatcaaaaagaaaaagaaaagaaattatggtttgggagtcatgcagctggaggctatgacattctgaccctccctgaacttctcctaagatcggcacttgagatattgtgcagaccatggacttgatggatcagctggtaccacccagatcaagaaactggttcatctgatcttgtagcccccacctgggaactgactcaacactagaagacaactttgactccctaaggttttatctctgactcaaccaatcagcactcctggctcactggcttccctcaacccacatgagttgtccttaaaaactctgatccttgaatgctcatggagactgatttgagtaataataaatctccggtctccggcacagctgtctacgtatgaattactctttctctatgttccctatcttgataaatcagctctgtctaggcagtggggcaaggtgaacccattgggtggttacaacctcagcctcctgagtagctgggactcacaggcatgtaccaccacacttggctaattttattatttatttatttatttatttatttatttatttattgagacagagtctcactctgtcacccaggctggagtgcagtggtgtgatctcggttcactgcaagctctgcctcctgggttcatgccattctcctgcctcagcctcccaagtagctgggaccacaggtgcccaccaccacgcctggataattttttgtatttttagtagagatggggtttcaccatgttagccaggatggtcttgatctcctggcctcgtgatctactcacctcagcctccgaaagtgctgggattacaggtgtgagccaccctacctggcctattttttattttgtagagatggggtcttgctgtgttgcccaggctggtttcaaactcctggcctcaagcaatcctcccaccttggcctcccaaagggctgagattatgtgcacctccacaattctataacaaggaaacccctctggagtcaacctgagcttcagctgaggaagccgctaagcactgggaagtctggggtcctgcccgaaaaatgagtttgggtgctgaggggagtgtctgagccacctcccttctctcccttggctagcacagtcaatccactgccatcctggcctgggctcttctctgcctgctgcaggagttggcaggtgcagaggttggcccagagtagcccagcccgtgaacctcaggggataggggcagcccccaactcccaaaagccaactggactgtccagttgagagaacctgagctgcaaggtcctggcatgtcttggagataaaaatgaagcagcatcgttgtctggggtaatacctgaggtttgtcttctcacgccaaggaaatcgagtgcacggatacaagaagtgagtttaggagcagaggtttataggcaaaagaaagataaaggaggatggctgtgtctcttgcgagagagagaggcacctgaatggggcttccgtcctgcggcagcgtgcactggattttatagacaggcttgaggaggtgatgtctgatttacatagggcccacagattggttggaccaggtgtgacgtttacatagtgcggggaagctggtcgccccaccctaatcttattatgcaaatggagtctttgcctggctggctccatgttgtcttctccttaccatacacatggttcggcaaagagaagagaagatgagcggccattttgaacatgcctagtcccaggtagccttttcctattggcacagctaccagcattcaccggtgcaagcttgtagcttgcttgtctctgtctgcagcttgattttacaggctgttttttgttagaaaagaaaatgatttggggcctgcttttcattaaaaggaaaaccttaccgaggacttctttgccttcactatctgcctaaataatttcttcttaactcctatatcaaaaacatggtgccaagagccacggtggccactggtccatgagaagagagaggaagagggtggcatttctacactctgttgcctctgtgaccttgtccttataagttgagggtcacaagtcagccttctctttggtttggttcattggtccagaggggacaaaacagatgtctgggaccttcaggttagttgcagagaagagctcccaggctctgtcagtgacactttttggggtgcagctatcaggtggccctgccagaatctgcctgttctgaatataccccagtgacttctggcctcttctctgtcccgaagtccacggaagtggctgggaccagttggggatttctaattccagtttctgccttgggaatgaagaggaatgtttccagctgagtttaaacacattaattcccaaattgagtttggctctcatgctatttaaaaaccctatttggtaagcacttcacagagcaatagctctgaaagagaaagattactttccattagcctggctcagtagcatgcattgttattcacaaggcagtcaaagagaatttaagtggaatgtgggtttcaaagtccaggtgagaggcagtcttccagaagtctgggctcttccactgctagggaagagaggacctggtggatgctggctcacttttgtttttgctttgttttctgagacagagtctcactctgttgcccaggttggagggctccatcatggtgtacttcagcctcgacctcccgggctgaagctatcctgccacctcagccttccaagtagctggtactacaggtatgagccaccacacccagctactttttatgatttttttctagaaacggagttttgccatgttgtccagtctggtctcaaactcctgagctcaagccatctgcccgtctcggcctcccaaagtgtgaggattacaggcatgagccgtagtgcatggccactggctcacttttgaaagcactttgcaaacctctgtcaccctcaaacagcccagcaaacagggaattgccaatgcaaagaagccgggtgcaggctgcctgccttgccttgggaccagagtggcctggcggtggaacatgagaggagagcagctgaccctggcctttaggggctggaaccaggtgagactgacccacctgagtcccacttgtgctccggtcacagcagtaggagccctctgtggggtgttctgcccctagctagggccagctcatcttcacccctcacttcttaaaattcttaagattccatttaagaattttgtgggtcactcagctctgcctgaaacagcctcactgtaactgaccagcgggttctccttgcctgctgcctggacagagccgatttatcaagacagggaaagtgcaatagagaaagagtttaattcacatggagcgggctgtatgggagaccagggttttcttattactcaaatgtctccctgaaaacttgggaatcgaggtttttaaggataatttggtgagtagggggttggaaagtggggagtgctgattggtcaggttggaaatgaaatcatagggagtcaaagttgtcctcttgcactgagtcagttcctgggtaggggccacaagaccagatgagccagtttatcgatctgggtggtgcctgctgatccatcaagtgcagggtctgcaaaatatctccagcactgatcttagcttttacaatagtgatgttatccccaggatagcaatttggggaggttcagagtcttgtaacctccagctgcttgatttccaaactgtaatttctaatcttgtggctaatttgttagtcctggaaaggcagtctagtccccaggcaggaagggggtttgttttgggaaagggctgttattgtctttgtttcaaagttgaactataaactaaattcctcccaaagttagttcagcctacgcccaggaatgaacaaggacagcttggaggttagaagcaagatggaatcaggtcagatctctttccctgtcatcattttctcagttacactttttccaaaagcagttccatcattgctgcaacttctggagaagtaccctagcctgccccctccctactcatcgctgcatcaaatctgccaccattcagtttggacaggacctgaatttaaatgaagaatgagaggagtcttttgttctgccgcatttttttgcttttggtttgaggaggtagggggtggtcggaagaggagacttagacatgctagtgacaagttttaatattccatctttttaaaaatttgaaatttttttatactgacatagagcaaatagcaccgtgccatgtttcataatttatgtggaggatctatcatgtgcttttgacaggtctagcatatttacagcggctacaggcttctctgtctaggaagatgccttctcttgactgcctcagtgatgttgctttctgaccatctgccccaccttgtctgcagcgtcccaggcagtttgaagtcatccgtccacctgcttcttaccttaatctgctttcttttgctcccagcaccatgtctatttgtcgttttctaggaatagtgaccttgactggcaggcaaactcttccctctcttctttcccctttttatttaaccttgattgaggcttgagtcctgtgctgggtcaggcactgacataaaagtggatttctgtcctcagggctcacagcttactggggccaacgtgatacatagcagcatatgaccacacacagaaagtgaaccaaacccaggctggagggaggatgggtcagtggagactttttctattgttttgttgttttgagacaaggtctcactctgttgcctaggctggagtgcagtggtgactttttgtatgttttttggtttttgagacaaggactgattctgtcacccatgctggagagcagtagtgcattgcagtcttttgtttttttttttgggacagagtctcgctctgttgcctaggctgcagtgcagtggtgcgatctcggctcactgcaagctctgcctcccaggttcacgccattctcctgcctcagtctcccgagtagcagggactgcaggcgaccgccaccacgcccagctaattttgtttttgtagttttagaagagacggggtttcaccatgttagccaagatggtctcgatctcctgacctcgtgatccgcctgccttggcctcccaaagtgctgagattacaggcatgagccaccacgcctggccagttgcagttttatcagtactgttcacagccagctgtgcaagctgagggctcttggcttagtggtgctgccatcccaaggggcgttctggaccttgactttagacctcatcttgaccttggaacctccaggtctggttcttcaatactggacaacatgtgagctctccattatcattcgtttatttatttttagagacaagatcttgctccattgcccaggctaaagtgcagtggcacaatcatagctctctgcagtcctgaactcctgggctcagtagatcctcctgtctcagcccaatgagtagctgggactataggtgtgtgccaccatacctggctaatttttaaaaacatattttatagagatggggtctcacaatgttgcccaggctgatctcaaactcctggactcaagcagtcctcctgccttggcctcccaatctgttggaattacatgtgtgagccaccacacctggccttttatttattattgttattattactttattttgagatggagtctcactctgttgcccagactggagtgcagtagcacaatcttggcttgctgcaacctccacctcctgggttcaagtgattctcccacctcagtctcccgaggagctgggactacaggcatgtgccaccacacctgggtaattttttttttttttttgtatttttagtagagacagcgtttcaccctgttgtccaggctggtcttggactcctgacctcaagtgatctacccccctcagcctcctaaagtgctggaattataggtgtgagtcactgtgcccagcctggcctttcatttttagatgaaactttttattttggggaaatggtagatttacatgcattggtaaaaaaaaaaaaaaaaaaaaaaaatggcgatcttgtgcactctttatcagttcccccaaaggtaataccttgaaatactactacaatgtcatcaccaggatactgacattaagacagtcaagagccatcacatttccatcactgcaaggttgcctcctgttgtctttctatagccgtatccatgttggtcctgccccctccccttcttgaccattggtaactataaatctgttctccatttctgtaattttgtcatttcaaaaacgctatataaatgtaataatgtgggctgggtgaggtggctgacatctgtaatcccagcactttgggaggccgaggtgggcagatcacctgaggtcaggagttcgagaccagcttggtcaacatagtgaaaccctgtctctaccaaaaatacaaaaattagctgggtgtggtggtgcccacctgtagtcccagctacttgggaggctgaggcctgagaatcacttaaacctgggaagcagaggttgcagagagctgagattgcaccactgtactcagcctgggtgacagtgtgagaccctatctaaaaaaaaaaaaaaaagaatatatatatatatacacacacacacagacacacacatatatatacacacacatatatatacatatataaaattgtgtggtatgtatcattttgggattgacttttttcactcatccatgttgttattgtctcaatagtttattccttattatttctgagttgtattttgtggtgtggatataccacagttgttttttaaccattcatccattcaatcagagaggagatcaagaaagatcaacaaaaaacaacactatagatcaactgggcctaacaggcatttacatagtactccacccaacagcaacagaatacacattcttcccaagcacacacgagatatttaccaggatagatcacccatgaaggtacaaaacaagtcttaaccaactgggttgtttccagttttggagtcacacagaaagctgctatgaatgtttgtgtataagtttttttgtgtgtatgtataagtctccatactcctgagataaatacccaagtgtgcaattgctcaatggtagttgcatgttttgtttctaagaacgtacaaactatttttctgagtggctctaccattttgtattcccaccagtgttgtatgagtgacccaatttctccttatcctcatcagaattaggtgttgtcactattttttattttgataacttttcatatgtgtggagagatatcttactgggatttaaatttgtatttccctggttgctaattataccaaacaacttttcatatgattattagccatctctaaatactctttgataaaatagctgtccatgtcttttacctatttctaattggattgtttgatgtttttgctgttgagagttctttatatatttgtgatgctagtcctttgtcagctatgtggtttggaaatatttgtttccagactgtagcatgtcttttcaatttctttttcacagaacaaaactttaaaattttgatgaggtccagcttatcaaaggtgtgtcttctgcaccctcccagggtgaatgagtaggtcttaaatgataaatctacactaatatttcttttctttctttctttcttttttttttttgagatggagtttcactctttttgcccaggctggagtgcaatggcgtgatctcagctcactgcaacctccacctcccgggttcaagtgattctctggcctcagcctcccaagtagctgggattacaggcatgcgccaccatgcctggctaattttgtagtttcagaagagaccaccatgctgctcaggcttgtctcgaactcctgacctcaggcgatctacccgccttggcctcccgaagtgctgggattataggtgtgagccaccgcaccagacccacactaatatttcagtctccctaagtctctacattaaaccaagaaaggttggaattttccaacttgctcactctgggccaccatcttggtctgtgtttcagccaagcaaccaa

SEQ ID NO: 22 - DNA, 5637 bp, Homo sapiens
ccatctcctgagctcagaggcggcagctgagcctgggagggaggcattgacctctcagcgcccacggcagagatggagccggtgactcgcccaggcccacactgcggtgcacagctgaactgggagctgggaccctgctgcctcttgctggcctcggggctgggagtgagaggagaaaacccttcggcctccgcagggcctggcactcaccgaaggtggtacccaggagggcccagcaggagaggagccagaggaaagccatggtgccgctggcaggggtgtaggacgcctgtctgccggtccccgttatagccctgtgtgcctgctgttatctggagaccttggggcgataatcccttccctgggagtgggcaagatgtgtcggtgcagggctggccaggaagcctgggatggcagcagctgtggccttagctgagccgggctaacccaggtggccttcgaccattgcctttctcctccaggcccaggcttgggcaggggcctccaggggctgagtccagcatccccgggtttgagccccagctgagtctcttgtgctctgcaaagaattcacttgatcttttcatggtttgaaaacccctgggcaggccgggcatggtggctcacgcctgtaatcccagcactttgggaggctgaggcggatggatcacgaggtcaagagatcaagaccatcctggccaacatggtgaaactccgtctctactaaaaatacaaaaaattagccaggcgtggtggcgcacacctgtattcccagctacttgggaggctgaggcaggagaatggtgtgaacccgggaggcggaggttgcagtgagacgagattgcgccactacactccagccttgtgacagtgagactgtctcaaaaaaggaaaaaaaacaaaaaaaaagaaaaaaacccaatgggcaatgtgaccaagtagaggagaggctgggggagcaggcctgtgccccatggtgtagccagaggctggggtgcgggtgctcgccgggtcccaggggatggctaagaaggctcagtgaaggcccagtcgacatctgtgttggtcacttgggctgtgtacaggggaggggtagctacctgctgtcctcacactgggccacccctgcacacaggcgccagcacacctgggccctggagctgagcaggtggcatcagagggcaagactgggcctagggcccggcctgggggcctggcatcgccctgatgagaactgatggaggctgagcctcagggcagagcatgggcggggacacctggttcctcgtgcgggtggcagcatgggtggtggagccctttctcagcaactgggaaacgggggagggagaaattttggattgaggctgccagatggagggcaagttccccaaaatgcacaggaaaaggtgcctcgtggctgttttcaattccaccacactgatgcctgcagcatgtgtgtttacagcacgggttgtggggtcaggcagctgtggagccgtgggcaaatgacttgccctctctgatcctgtatgtaattgaggatgcttagagtatgggtcccatgacaaaaggaagagccttcttgagcaccaggaccaggccaagcatgcaatccacgctggcggggcccctacattcctctttcttgagtgaatcacctgttcaggcccttcgctcattctagaagattgtctgaggacagaggggttggcgggcaccagcaggacggagcatggcctggtcgggatgagacgcacccacctctgcatgcacatgggctcttcctgccagccagtgcccaccaggcccacgggaacagctgaacaaaaccaacaaattcctgcgtgtggcagctgacagccgggaggaggctggagagtttagggaagagagtcaatttttaaaataagtaaaatacacacaccagcagctaaagagttcttcttctcattattattactgatactgaggccaggagggcctcactctgaaggggagatttaagcaaacagcctaggagtttgtgggagcagtccagagcaccctcggaggagaggaaacgaacctggggtcgcaggacccaaagaggtctgcgtccctagggcagcgaagagctcagaagtcgagggggcgggcccaggagggccctaaggagacggtactagagcctcaggggcagcccctagctataagctggctggggcagatgggggaaagggcgcaagccctcacctggcctgagtgacctgtggccccagctgtgtggccttaggagctaaccgctggccaggacgtcacccgccatgtccccaaccccgcaaaggctacagaggcttgtgggaaccgtgcagctgcagcagtggtcggggacaggcacgcacaggtgttcccactccactgctcctggggaagggacccctcccccacactgccctccagtccccatgggatctggacccgaacggcgaggaaggagcccggggacactcaggacagatgagtcaggacacacgcgtgagccggggccctggtggatcggggaggcagaaccgtggccttggccagagtgggagcgggagggatgagctgggggtccccacgtgctgcagcctcctggccacctcttcctttacttaccttgaaatgccctcacttaaaatgtatataaagccaggtgcagtagctcatgcctgtgatcccagcactttgggaggccgaggcaggaggctcacttgagcccaggagttcaagaccagcctgggcaacatggtgagaccccgtctgtacaaaaaataaattagtcaggtgtgatggcgcaggcatggagtcccagatccaggctgggacttgggaaactgagatgggaggatcacttgagcgtaggaggtggaggctgcaagtgagcggtgatcatgccactggactccagcctgggcgacagggtgagagcctgtctcaaaaaaacaaaaacaaacaaacaaacaaacaaccaaacaaacaacgaagtggatataggttgataacttgtgaggatccaggcacctctgtacccaccacctgcctcaaggcagagaccatttccttcacagccccttggcagtcaatcccccacctccagaagcaaccactgttctgatttctttacccggaggttaggttttggttttggttgaaagaggctggttctgatgcccaggctgtagtgcagtggcatgatcacggctcactgcagcctcagcctcctcagctcaagcaatcctcccacctcagcctcctaaagtgctgggattacaggtgtgagtcatcgcaccaggggatgttgtcgttattgttaaattttaaaaactgttagcagccaggtgcagtggctcatggttgtaatccttgcgctttgggaggccaaggggagaggatccctttagctcaggagttcaagaccagcctgggcagcatagtgagacctgtcgctaaaaaaaaaaaaaaaaaaaaaaaaagccaggcatggtagctggcacctgtaatcccaggtactggggatgctaaggtaagagcatggcttgagcccgggaggaggaggttgcagtgagctgagatcacgccactgcactccagcctgggggacagagccagaccttgtctcacacacacacacaaaaccaactttaaattgtggtaatacacataacaaaattgaccattgcacccgttgtttctttgcttgtttgtttgcttttgagatagagtctcactctgtcgcccaggctggagtgaagtggcatgatcttggctcactgcaagctctgcctcccgggttcatgccatgctcctgcctcagcctcctgagtagctgggactataggcgcccgccaccacgcccagctaatttttttgtatatttcagtatagatggcgtttcactgtgttagccaggatggtctcgacctcctgacctcgtgatccgcccaccccggcctcccaaagtgctgggattacaggcttgagccaccatgcccggcccgcacctgtttttaagtgtaccattcagcgctaagcacgtccacagtgccgtgcggccactcatctcacggaactgaaactctgaatcctgcccatcagttagttttcgggttctggaatttcatgtgaacagaacccaggtgtttctggaaatccggctgctttcactcagcatctggtctttggagttcacccacgctgttgcagagagcagcagtctcttcctttttattgctggaatgcactacagtttgtctatctgttctgtagttttgatctattatgaataaagctgctataataaataaaacatatattaaaacatccaaaggcaagtctttatgcagatgtgtgttcatttctcttgggcaaacacctaggagtaggccaggcacggtggctcacgcctgcaatcccagcactttgggaggctgaggtgggcagctcacttggggtcaagagttcaagaccagcctggccaacatagtgaaaccctgtctctactaaaaatacaaatagtagccgggcatgctgatgtgtgcctgtattcccagctactcgggaagctgaggtgggagaattgcttgaacccgggaggcggaggtcgtggtgagtcgaccaagccatggcactccagcctgggtggcagagcaggactccgtctcaaacaaaatatatgagtagaacagcagggtcgtaggctgggcctgtgtttatggaaactgtcaaagtgttttctcagtggccatctacttttccttcatagcaaagcaaagcaaagcaggatctgagtctgcagccccctctgagcatctgcccttctgagaggcaccttcataaaattcccttgcccccttccgaaaggcagaggacttgggagctggtacacagtgggttaggaggtgagacccttctctttttttttttttttgagacagggtctcactctgtcacccaggctggagtacagtggcacgatcacggctcagcacaggcttgacctcccaggtccagcctcccagttagctgggactacaggtgtgggccaccatgcctggctaatttttgtatttttttgtagagacaagatctccctatgtcgcctaggctggtctcagactcctgggttcaagcaatctgcccgcttcggctgcccaaactgctaggattacaggtgtgagccactgtgcctggccaggacctttctcacagcaccagtgggcttgtctaaacttaccaagtggagcgatttaatggaatggttctttgcctaaaccctttccgctgggttttgtccctcaccaaatgaggctgggggaatgtttttttagagaaagcacagggtgctccctgagccaacgagatcccatgcagcttgcttagaaaacaattgtccccctgctccatgttgatgcctggctagcaatagtggggagatgggctggggggcgtttcctgacccaggaggacagcgagtgtgggcgccggatgtccagcaggcgctcagcccttgtggagatcagtgacatctgcccaaatgggaaccagcgggggctgcttattcagagcttgccacagcaagggagtcggcctctgtcacttgcattgactaagacgcca
